(19) United States
(12) Patent Application Publication
(10) Pub. No.: US 2022/0356457 A1
(43) Pub. Date: Nov. 10, 2022

(54) RECOMBINANT HUMAN SIALIDASES, SIALIDASE FUSION PROTEINS, AND METHODS OF USING THE SAME

(71) Applicant: Palleon Pharmaceuticals Inc., Waltham, MA (US)

(72) Inventors: Li Peng, Lexington, MA (US); Lizhi Cao, Stoneham, MA (US); Sandip A. Shelke, Belmont, MA (US); Andrew S. Turner, Waltham, MA (US); Lihui Xu, Chestnut Hill, MA (US)

(21) Appl. No.: 17/624,121

(22) PCT Filed: Jul. 3, 2020
(86) PCT No.: PCT/US2020/040828

§ 371 Date: Dec. 30, 2021

Related U.S. Application Data
(60) Provisional application No. 62/957,011, filed on Jan. 3, 2020.
(60) Provisional application No. 62/870,403, filed on Jul. 3, 2019.

(51) Int. Cl. C12N 9/24; A61K 47/68; A61K 38/00

(52) U.S. Cl. CPC C12N 9/2402; A61K 47/6815; A61K 47/6851; A61K 47/6849; A61K 38/00; C07K 2319/30; C12Y 302/01018

(57) ABSTRACT

The invention relates generally to recombinant human sialidases and recombinant sialidase fusion proteins, wherein the sialidase optionally contains one or more mutations compared to wild-type human sialidase, e.g., a substitution, deletion, or addition of at least one amino acid. The invention also provides antibody conjugates including a sialidase and an antibody or a portion thereof. The invention further relates to methods of using the sialidase fusion proteins or antibody conjugates for treating cancer.

### CROSS REFERENCE TO RELATED APPLICATIONS

[0001] This application claims the benefit of, and priority to, U.S. Provisional Patent Application Ser. No. 62/870,403, filed Jul. 3, 2019, and U.S. Provisional Patent Application er. No. 62/957,011, filed Jan. 3, 2020, the entire disclosure of each of which is hereby incorporated by reference in its entirety.

### FIELD OF THE INVENTION

[0002] The invention relates generally to recombinant human sialidases and recombinant sialidase fusion proteins, and their use in the treatment of cancer.

### BACKGROUND

[0003] A growing body of evidence supports roles for glycans, and sialoglycans in particular, at various pathophysiological steps of tumor progression. Glycans regulate tumor proliferation, invasion, hematogenous metastasis and angiogenesis (Fuster et al. (2005) NAT. REV. CANCER 5(7): 526-42). The sialylation of cell surface glycoconjugates is frequently altered in cancers, resulting in the expression of sialylated tumor-associated carbohydrate antigens. The expression of sialylated glycans by tumor cells is often associated with increased aggressiveness and metastatic potential of a tumor.

[0004] It has recently become apparent that Siglecs (sialic acid-binding immunoglobulin-like lectins), a family of sialic acid binding lectins, play a role in cancer immune suppression by binding to hypersialylated cancer cells and mediating the suppression of signals from activating NK cell receptors, thereby inhibiting NK cell-mediated killing of tumor cells (Jandus et al. (2014) J. CLIN. INVEST. 124: 1810-1820; Läubli et al. (2014) PROC. NATL. ACAD. SCI. USA 111: 14211-14216; Hudak et al. (2014) NAT. CHEM. BIOL. 10: 69-75). Likewise, enzymatic removal of sialic acids by treatment with sialidase can enhance NK cell-mediated killing of tumor cells (Jandus, supra; Hudak, supra; Xiao et al. (2016) PROC. NATL. ACAD. SCI. USA 113(37): 10304-9.)

[0005] Cancer immunotherapy with immune checkpoint inhibitors, including antibodies blocking the PD-1/PD-L1 pathway, has improved the outcome of many cancer patients. However, despite advances that have been made to date, many patients do not respond to currently available immune checkpoint inhibitors. Accordingly, there is still a need for effective interventions that overcome the immune suppressive tumor microenvironment and for treating cancers associated with hypersialylated cancer cells.

### SUMMARY OF THE INVENTION

[0006] The invention is based, in part, upon the discovery that it is possible to produce recombinant mutant forms of human sialidase enzymes and fusion proteins and/or antibody conjugates containing such enzymes that have suitable substrate specificities and activities to be useful in removing sialic acid and/or sialic acid containing molecules from the surface of cancer cells and/or removing sialic acid and/or sialic acid containing molecules from the tumor microenvironment, and/or reducing the concentration of sialic acid and/or sialic acid containing molecules in the tumor microenvironment.

[0007] Accordingly, in one aspect, the invention provides a recombinant mutant human sialidase enzyme, wherein the sialidase comprises: (a) a substitution of a proline residue at a position corresponding to position 5 of wild-type human Neu2 (P5); (b) a substitution of a lysine residue at a position corresponding to position 9 of wild-type human Neu2 (K9); (c) a substitution of a lysine residue at a position corresponding to position 44 of wild-type human Neu2 (K44); (d) a substitution of a lysine residue at a position corresponding to position 45 of wild-type human Neu2 (K45); (e) a substitution of a leucine residue at a position corresponding to position 54 of wild-type human Neu2 (L54); (f) a substitution of a proline residue at a position corresponding to position 62 of wild-type human Neu2 (P62); (g) a substitution of a glutamine residue at a position corresponding to position 69 of wild-type human Neu2 (Q69); (h) a substitution of an arginine residue at a position corresponding to position 78 of wild-type human Neu2 (R78); (i) a substitution of an aspartic acid residue at a position corresponding to position 80 of wild-type human Neu2 (D80); (j) a substitution of an alanine residue at a position corresponding to position 93 of wild-type human Neu2 (A93);

[0008] (k) a substitution of a glycine residue at a position corresponding to position 107 of wild-type human Neu2 (G107); (l) a substitution of a glutamine residue at a position corresponding to position 108 of wild-type human Neu2 (Q108); (m) a substitution of a glutamine residue at a position corresponding to position 112 of wild-type human Neu2 (Q112); (n) a substitution of a cysteine residue at a position corresponding to position 125 of wild-type human Neu2

[0009] (C125); (o) a substitution of a glutamine residue at a position corresponding to position 126 of wild-type human Neu2 (Q126); (p) a substitution of an alanine residue at a position corresponding to position 150 of wild-type human Neu2 (A150); (q) a substitution of a cysteine residue at a position corresponding to position 164 of wild-type human Neu2 (C164); (r) a substitution of an arginine residue at a position corresponding to position 170 of wild-type human Neu2 (R170); (s) a substitution of an alanine residue at a position corresponding to position 171 of wild-type human Neu2 (A171); (t) a substitution of a glutamine residue at a position corresponding to position 188 of wild-type human Neu2 (Q188); (u) a substitution of an arginine residue at a position corresponding to position 189 of wild-type human Neu2 (R189); (v) a substitution of an alanine residue at a position corresponding to position 213 of wild-type human Neu2 (A213); (w) a substitution of a leucine residue at a position corresponding to position 217 of wild-type human Neu2 (L217);

[0010] (x) a substitution of a glutamic acid residue at a position corresponding to position 225 of wild-type human Neu2 (E225); (y) a substitution of a histidine residue at a position corresponding to position 239 of wild-type human Neu2 (H239); (z) a substitution of a leucine residue at a position corresponding to position 240 of wild-type human Neu2 (L240); (aa) a substitution of an arginine residue at a position corresponding to position 241 of wild-type human Neu2 (R241); (bb) a substitution of an alanine residue at a position corresponding to position 242 of wild-type human Neu2 (A242); (cc) a substitution of a valine residue at a position corresponding to position 244 of wild-type human Neu2 (V244); (dd) a substitution of a threonine residue at a position corresponding to position 249 of wild-type human Neu2 (T249); (ee) a substitution of an aspartic acid residue at a position corresponding to position 251 of wild-type human Neu2 (D251); (ff) a substitution of a glutamic acid residue at a position corresponding to position 257 of wild-type human Neu2 (E257); (gg) a substitution of a serine residue at a position corresponding to position 258 of wild-type human Neu2 (S258); (hh) a substitution of a leucine residue at a position corresponding to position 260 of wild-type human Neu2 (L260); (ii) a substitution of a valine residue at a position corresponding to position 265 of wild-type human Neu2 (V265); (jj) a substitution of a glutamine residue at a position corresponding to position 270 of wild-type human Neu2 (Q270); (kk) a substitution of a tryptophan residue at a position corresponding to position 292 of wild-type human Neu2 (W292); (ll) a substitution of a serine residue at a position corresponding to position 301 of wild-type human Neu2 (S301); (mm) a substitution of a tryptophan residue at a position corresponding to position 302 of wild-type human Neu2 (W302); (nn) a substitution of a valine residue at a position corresponding to position 363 of wild-type human Neu2 (V363); or (oo) a substitution of a leucine residue at a position corresponding to position 365 of wild-type human Neu2 (L365); or a combination of any of the foregoing substitutions. For example, the sialidase may comprise a substitution of K9, P62, A93, Q216, A242, Q270, S301, W302, V363, or L365, or a combination of any of the foregoing substitutions.

[0011] In certain embodiments, in the sialidase: (a) the proline residue at a position corresponding to position 5 of wild-type human Neu2 is substituted by histidine (P5H); (b) the lysine residue at a position corresponding to position 9 of wild-type human Neu2 is substituted by aspartic acid (K9D); (c) the lysine residue at a position corresponding to position 44 of wild-type human Neu2 is substituted by arginine (K44R) or glutamic acid (K44E); (d) the lysine residue at a position corresponding to position 45 of wild-type human

[0012] Neu2 is substituted by alanine (K45A), arginine (K45R), or glutamic acid (K45E); (e) the leucine residue at a position corresponding to position 54 of wild-type human Neu2 is substituted by methionine (L54M); (f) the proline residue at a position corresponding to position 62 of wild-type human Neu2 is substituted by asparagine (P62N), aspartic acid (P62D), histidine (P62H), glutamic acid (P62E), glycine (P62G), serine (P62S), or threonine (P62T); (g) the glutamine residue at a position corresponding to position 69 of wild-type human Neu2 is substituted by histidine (Q69H); (h) the arginine residue at a position corresponding to position 78 of wild-type human Neu2 is substituted by lysine (R78K); (i) the aspartic acid residue at a position corresponding to position 80 of wild-type human Neu2 is substituted by proline (D8OP); (j) the alanine residue at a position corresponding to position 93 of wild-type human Neu2 is substituted by glutamic acid (A93E) or lysine (A93K); (k) the glycine residue at a position corresponding to position 107 of wild-type human Neu2 is substituted by aspartic acid (G107D); (l) the glutamine residue at a position corresponding to position 108 of wild-type human Neu2 is substituted by histidine (Q108H); (m) the glutamine residue at a position corresponding to position 112 of wild-type human Neu2 is substituted by arginine (Q112R) or lysine (Q112K); (n) the cysteine residue at a position corresponding to position 125 of wild-type human Neu2 is substituted by leucine (C125L); (o) the glutamine residue at a position corresponding to position 126 of wild-type human Neu2 is substituted by leucine (Q126L), glutamic acid (Q126E), phenylalanine (Q126F), histidine (Q126H), isoleucine (Q126I), or tyrosine (Q126Y); (p) the alanine residue at a position corresponding to position 150 of wild-type human Neu2 is substituted by valine (A150V); (q) the cysteine residue at a position corresponding to position 164 of wild-type human Neu2 is substituted by glycine (C164G); (r) the arginine residue at a position corresponding to position 170 of wild-type human Neu2 is substituted by proline (R170P); (s) the alanine residue at a position corresponding to position 171 of wild-type human Neu2 is substituted by glycine (A171G); (t) the glutamine residue at a position corresponding to position 188 of wild-type human Neu2 is substituted by proline (Q188P); (u) the arginine residue at a position corresponding to position 189 of wild-type human Neu2 is substituted by proline (R189P); (v) the alanine residue at a position corresponding to position 213 of wild-type human Neu2 is substituted by cysteine (A213C), asparagine (A213N), serine (A213S), or threonine (A213T); (w) the leucine residue at a position corresponding to position 217 of wild-type human Neu2 is substituted by alanine (L217A) or valine (L217V); (x) the threonine residue at a position corresponding to position 249 of wild-type human Neu2 is substituted by alanine (T249A); (y) the aspartic acid residue at a position corresponding to position 251 of wild-type human Neu2 is substituted by glycine (D251G); (z) the glutamic acid residue at a position corresponding to position 225 of wild-type human Neu2 is substituted by proline (E225P); (aa) the histidine residue at a position corresponding to position 239 of wild-type human Neu2 is substituted by proline (H239P); (bb) the leucine residue at a position corresponding to position 240 of wild-type human Neu2 is substituted by aspartic acid (L240D), asparagine (L240N), or tyrosine (L240Y); (cc) the arginine residue at a position corresponding to position 241 of wild-type human Neu2 is substituted by alanine (R241A), aspartic acid (R241D), leucine (R241L), glutamine (R241Q). or tyrosine (R241Y); (dd) the alanine residue at a position corresponding to position 242 of wild-type human Neu2 is substituted by cysteine (A242C), phenylalanine (A242F), glycine (A242G), histidine (A242H), isoleucine (A2421), lysine (A242K), leucine (A242L), methionine (A242M), asparagine (A242N), glutamine (A242Q), arginine (A242R), serine (A242S), valine (A242V), tryptophan (A242W), or tyrosine (A242Y); (ee) the valine residue at a position corresponding to position 244 of wild-type human Neu2 is substituted by isoleucine (V244I), lysine (V244K), or proline (V244P); (ff) the glutamic acid residue at a position corresponding to position 257 of wild-type human Neu2 is substituted by proline (E257P); (gg) the serine residue at a position corresponding to position 258 is substituted by cysteine (S258C); (hh) the leucine residue at a position corresponding to position 260 of wild-type human Neu2 is substituted by aspartic acid (L260D), phenylalanine (L260F), glutamine (L260Q), or threonine (L260T); (ii) the valine residue at a position corresponding to position 265 of wild-type human Neu2 is substituted by phenylalanine (V265F); (jj) the glutamine residue at a position corresponding to position 270 of wild-type human Neu2 is substituted by alanine (Q270A), histidine (Q270H), phenylalanine (Q270F), proline (Q270P), serine (Q270S), or threonine (Q270T); (kk) the tryptophan residue at a position corresponding to position 292 of wild-type human Neu2 is substituted by arginine (W292R); (ll) the serine residue at a position corresponding to position 301 of wild-type human Neu2 is substituted by alanine (S301A), aspartic acid (S301D), glutamic acid (S301E), phenylalanine (S301F), histidine (S301H), lysine (S301K), leucine (S301L), methionine (S301M), asparagine (S301N), proline (S301P), glutamine (S301Q), arginine (S301R), threonine (S301T), valine (S301V), tryptophan (S301W), or tyrosine (S301Y); (mm) the tryptophan residue at a position corresponding to position 302 of wild-type human Neu2 is substituted by alanine

[0013] (W302A), aspartic acid (W302D), phenylalanine (W302F), glycine (W302G), histidine (W302H), isoleucine (W302I), lysine (W302K), leucine (W302L), methionine (W302M), asparagine (W302N), proline (W302P), glutamine (W302Q), arginine (W302R), serine (W302S), threonine (W302T), valine (W302V), or tyrosine (W302Y); (nn) the valine residue at a position corresponding to position 363 of wild-type human Neu2 is substituted by arginine (V363R); or (oo) the leucine residue at a position corresponding to position 365 of wild-type human Neu2 is substituted by glutamine (L365Q), histidine (L365H), isoleucine (L365I), lysine (L365K) or serine (L365S); or the sialidase comprises a combination of any of the foregoing substitutions. For example, the sialidase may comprise a substitution selected from K9D, P62G, P62N, P62S, P62T, A93E, Q126Y, A242F, A242W, A242Y, Q270A, Q270T, S301A, S301R, W302K, W302R, V363R, or L365I, or a combination of any of the foregoing substitutions.

[0014] In certain embodiments, the sialidase further comprises: (a) a substitution or deletion of a methionine residue at a position corresponding to position 1 of wild-type human Neu2 (M1); (b) a substitution of a valine residue at a position corresponding to position 6 of wild-type human Neu2 (V6); (c) a substitution of an isoleucine residue at a position corresponding to position 187 of wild-type human Neu2 (I187); or (d) a substitution of a cysteine residue at a position corresponding to position 332 of wild-type human Neu2 (C332); or a combination of any of the foregoing substitutions.

[0015] In certain embodiments, in the sialidase: (a) the methionine residue at a position corresponding to position 1 of wild-type human Neu2 is deleted (ΔM1), is substituted by alanine (M1A), or is substituted by aspartic acid (M1D); (b) the valine residue at a position corresponding to position 6 of wild-type human Neu2 is substituted by tyrosine (V6Y); (c) the isoleucine residue at a position corresponding to position 187 of wild-type human Neu2 is substituted by lysine (I187K); or (d) the cysteine residue at a position corresponding to position 332 of wild-type human Neu2 is substituted by alanine (C332A); or the sialidase comprises a combination of any of the foregoing substitutions.

[0016] In certain embodiments, the sialidase comprises: (a) the M1D, V6Y, P62G, A93E, I187K, and C332A substitutions; (b) the M1D, V6Y, K9D, A93E, I187K, C332A, V363R, and L365I substitutions; (c) the M1D, V6Y, P62N, I187K, and C332A substitutions; (d) the M1D, V6Y, I187K, Q270A, S301R, W302K, and C332A substitutions; (e) the M1D, V6Y, P62S, I187K, Q270A, S301R, W302K, and C332A substitutions; (f) the M1D, V6Y, P62T, I187K, Q270A, S301R, W302K, and C332A substitutions; (g) the M1D, V6Y, P62N, I187K, Q270A, S301R, W302K, and C332A substitutions; (h) the M1D, V6Y, P62G, A93E, I187K, S301A, W302R, and C332A substitutions; (i) the M1D, V6Y, P62G, A93E, Q126Y, I187K, Q270T, and C332A substitutions; (j) the M1D, V6Y, P62G, A93E, Q126Y, I187K, and C332A substitutions; or (k) the M1D, V6Y, P62G, A93E, Q126Y, I187K, A242F, Q270T, and C332A substitutions.

[0017] In certain embodiments, the sialidase has a different substrate specificity than the corresponding wild-type sialidase. For example, in certain embodiments the sialidase can cleave α2,3, α2,6, and/or α2,8 linkages. In certain embodiments the sialidase can cleave α2,3 and α2,8 linkages.

[0018] In certain embodiments, the sialidase comprises any one of SEQ ID NOs: 48-54, 149, 154, 159, or 191, or an amino acid sequence that has at least 85%, 90%, 95%, 96%, 97%, 98%, or 99% sequence identity to any one of SEQ ID NOs: 48-54, 149, 154, 159, or 191.

[0019] In another aspect, the invention provides a recombinant mutant human sialidase comprising a mutation or combination of mutations set forth in any one of Tables 5-9, 11-13, or 15-30. In certain embodiments, the sialidase further comprises a mutation or combination of mutations set forth in any one of Tables 1-4.

[0020] In another aspect, the invention provides a fusion protein comprising (or consisting essentially of): (a) a recombinant mutant human sialidase disclosed herein; and (b) an immunoglobulin Fc domain and/or an immunoglobulin antigen-binding domain; wherein the sialidase and the Fc domain and/or the antigen-binding domain are linked by a peptide bond or an amino acid linker. In certain embodiments, the fusion protein further comprises a linker, for example, an amino acid linker, connecting the sialidase enzyme and the Fc domain and/or the antigen-binding domain. In certain embodiments, the immunoglobulin antigen-binding domain is associated (for example, covalently or non-covalently associated) with a second immunoglobulin antigen-binding domain to produce an antigen-binding site.

[0021] In certain embodiments, the immunoglobulin Fc domain is derived from a human IgG1, IgG2, IgG3, IgG4, IgAl, IgA2, IgD, IgE, or IgM Fc domain, e.g., the immunoglobulin Fc domain is derived from a human IgG1, IgG2, IgG3, or IgG4 Fc domain, e.g., the immunoglobulin Fc domain is derived from a human IgG1 Fc domain.

[0022] In certain embodiments, the immunoglobulin antigen-binding domain is derived from an antibody selected from trastuzumab, daratumumab, girentuximab, ofatumumab, avelumab, and rituximab.

[0023] In another aspect, the invention provides an antibody conjugate comprising any of the foregoing fusion proteins. In certain embodiments, the antibody conjugate comprises a single sialidase. In other embodiments, the antibody conjugate comprises two sialidases, which can be the same or different. In certain embodiments the antibody conjugate comprises two identical sialidases. In certain embodiments, the antibody conjugate comprises a single antigen-binding site. In other embodiments, the antibody conjugate comprises two antigen-binding sites, which can be the same or different. In certain embodiments, the antibody conjugate comprises two identical antigen-binding sites.

[0024] In certain embodiments, the antibody conjugate has a molecular weight from about 135 kDa to about 165 kDa, or the antibody conjugate has a molecular weight from about 215 kDa to about 245 kDa.

[0025] In certain embodiments, the antibody conjugate comprises: (a) a first polypeptide comprising an immunoglobulin light chain; (b) a second polypeptide comprising an immunoglobulin heavy chain; and (c) a third polypeptide comprising an immunoglobulin Fc domain and a sialidase; wherein the first and second polypeptides are covalently linked together and the second and third polypeptides are covalently linked together, and wherein the first polypeptide and the second polypeptide together define an antigen-binding site. The third polypeptide may, for example, comprise the sialidase and the immunoglobulin Fc domain in an N- to C-terminal orientation.

[0026] In certain embodiments, the antibody conjugate comprises: (a) a first polypeptide comprising a first immunoglobulin light chain; (b) a second polypeptide comprising a first immunoglobulin heavy chain and a first sialidase; (c) a third polypeptide comprising a second immunoglobulin heavy chain and a second sialidase; and (d) a fourth polypeptide comprising a second immunoglobulin light chain; wherein the first and second polypeptides are covalently linked together, the third and fourth polypeptides are covalently linked together, and the second and third polypeptides are covalently linked together, and wherein the first polypeptide and the second polypeptide together define a first antigen-binding site, and the third polypeptide and the fourth polypeptide together define a second antigen-binding site. The second and third polypeptides may, for example, comprise the first and second immunoglobulin heavy chain and the first and second sialidase, respectively, in an N- to C-terminal orientation.

[0027] In certain embodiments, the antibody conjugate comprises: (a) a first polypeptide comprising a first sialidase, a first immunoglobulin Fc domain, and a first single chain variable fragment (scFv); and (b) a second polypeptide comprising a second sialidase, a second immunoglobulin Fc domain, and an optional second single chain variable fragment (scFv); wherein the first and second polypeptides are covalently linked together, and wherein the first scFv defines a first antigen-binding site, and the second scFv, when present, defines a second antigen-binding site. The first polypeptide may, for example comprise the first sialidase, the first immunoglobulin Fc domain, and the first scFv in an N- to C-terminal orientation. The second polypeptide may, for example, comprise the second sialidase, the second immunoglobulin Fc domain, and the optional second scFv in an N- to C-terminal orientation.

[0028] In certain embodiments, the antibody conjugate comprises: (a) a first polypeptide comprising an immunoglobulin light chain; (b) a second polypeptide comprising an immunoglobulin heavy chain and a single chain variable fragment (scFv); and (c) a third polypeptide comprising an immunoglobulin Fc domain and a sialidase, wherein the first and second polypeptides are covalently linked together and the second and third polypeptides are covalently linked together, and wherein the immunoglobulin light chain and immunoglobulin heavy chain together define a first antigen-binding site and the scFv defines a second antigen-binding site. The second polypeptide may, for example comprise the immunoglobulin heavy chain and the scFv in an N- to C-terminal orientation. The third polypeptide may, for example, comprise the sialidase and the immunoglobulin Fc domain in an N- to C-terminal orientation.

[0029] In another aspect, the invention provides an isolated nucleic acid comprising a nucleotide sequence encoding any of the foregoing recombinant mutant human sialidases, any of the foregoing fusion proteins, or at least a portion of any of the foregoing antibody conjugates. In another aspect, the invention provides an expression vector comprising any of the foregoing nucleic acids. In another aspect, the invention provides a host cell comprising any of the foregoing expression vectors.

[0030] In another aspect, the invention provides a pharmaceutical composition comprising any of the foregoing recombinant mutant human sialidases, any of the foregoing fusion proteins, or any of the foregoing antibody conjugates.

[0031] In another aspect, the invention provides a method of treating cancer in a subject in need thereof. The method comprises administering to the subject an effective amount of any of the foregoing sialidases, any of the foregoing fusion proteins, any of the foregoing antibody conjugates, or any of the foregoing pharmaceutical compositions. In certain embodiments, the cancer is an epithelial cancer. In certain embodiments, the cancer is a solid tumor, soft tissue tumor, hematopoietic tumor or metastatic lesion. In certain embodiments, the solid tumor is a sarcoma, adenocarcinoma, or carcinoma. In certain embodiments, the solid tumor is a head and neck (e.g., pharynx), thyroid, lung (e.g., small cell or non-small cell lung carcinoma (NSCLC)), breast, lymphoid, gastrointestinal (e.g., oral, esophageal, stomach, liver, pancreas, small intestine, colon and rectum, anal canal), genital or genitourinary tract (e.g., renal, urothelial, bladder, ovarian, uterine, cervical, endometrial, prostate, testicular), CNS (e.g., neural or glial cell, e.g., neuroblastoma or glioma), or skin (e.g., melanoma) tumor. In certain embodiments, the hematopoietic tumor is a leukemia, acute leukemia, acute lymphoblastic leukemia (ALL), B-cell, T-cell or FAB ALL, acute myeloid leukemia (AML), chronic myelocytic leukemia (CML), chronic lymphocytic leukemia (CLL), e.g., transformed CLL, diffuse large B-cell lymphoma (DLBCL), follicular lymphoma, hairy cell leukemia, myelodyplastic syndrome (MDS), lymphoma, Hodgkin's disease, malignant lymphoma, non-Hodgkin's lymphoma, Burkitt's lymphoma, multiple myeloma, or Richter's Syndrome (Richter's Transformation). In certain embodiments, the cancer is selected from an endometrial cancer, ovarian cancer, cervical cancer, vulvar cancer, uterine cancer, fallopian tube cancer, breast cancer, prostate cancer, lung cancer, pancreatic cancer, urinary cancer, bladder cancer, head and neck cancer, oral cancer and liver cancer.

[0032] In another aspect, the invention provides a method of increasing expression of HLA-DR, CD86, CD83, IFNγ, IL-1b, IL-6, TNFα, IL-17A, IL-2, or IL-6 in a cell or tissue. The method comprises contacting the cell or tissue with an effective amount of any of the foregoing sialidases, any of the foregoing fusion proteins, any of the foregoing antibody conjugates, or any of the foregoing pharmaceutical compositions. In certain embodiments, the cell is selected from a dendritic cell and a peripheral blood mononuclear cell (PBMC).

[0033] These and other aspects and features of the invention are described in the following detailed description and claims.

### DESCRIPTION OF THE DRAWINGS

[0034] The invention can be more completely understood with reference to the following drawings.

[0035] FIG. 1 depicts an SDS-PAGE gel showing recombinant human Neu1, Neu2, Neu3, and Salmonella typhimurium (St-sialidase) under non-reducing and reducing conditions. Monomer and dimer species are indicated.

[0036] FIG. 2 is a bar graph showing the enzymatic activity of recombinant human Neu1, Neu2, and Neu3.

[0037] FIG. 3 is a line graph showing enzymatic activity as a function of substrate concentration for recombinant human Neu2 and Neu3 at the indicated pH.

[0038] FIG. 4 depicts a schematic representation of an exemplary sialic acid biotinylated probe that can be used in phage display or yeast display screening for Neu2 variants.

[0039] FIG. 5 depicts an exemplary protocol that facilitates phage display screening of Neu2 variants.

[0040] FIG. 6 depicts an exemplary protocol that facilitates yeast display screening of Neu2 variants.

[0041] FIG. 7A depicts an SDS-PAGE gel showing recombinant Neu2-Fc (wildtype) and Neu2-M106-Fc under non-reducing and reducing conditions. FIG. 7B is an SEC-HPLC trace of Neu2-Fc (wildtype) and Neu2-M106-Fc. The monomer species has a retention time of 21 minutes.

[0042] FIG. 8 is a line graph depicting the enzymatic activity of Neu2 variant M106.

[0043] FIGS. 9A-9I depict schematic representations of certain antibody conjugate constructs containing a sialidase enzyme, e.g., a human sialidase enzyme, and an antigen binding site. For each antibody conjugate construct that contains more than one (e.g., two) sialidase, each sialidase may be the same or different. For each antibody conjugate construct that contains more than one (e.g., two) antigen binding site, each antigen binding site may be the same or different. For each antibody conjugate construct that contains an Fc domain, it is understood that the Fc domain can be a wild type Fc domain or can be an engineered Fc domain. For example, the Fc domain may be engineered to contain either a “knob” mutation, e.g., T366Y, or a “hole” mutation, e.g., Y407T, or both, to promote heterodimerization, or the Fc domain may be engineered to contain one or more modifications, e.g., point mutations, to provide any other modified Fc domain functionality.

[0044] FIG. 10 depicts schematic representations of certain antibody conjugate constructs containing a sialidase enzyme, e.g., a human sialidase enzyme, and an antigen binding site. For each antibody conjugate construct that contains more than one (e.g., two) antigen binding site, each antigen binding site may be the same or different. For each antibody conjugate construct that contains an Fc domain, it is understood that the Fc domain can be a wild type Fc domain or can be an engineered Fc domain. For example, the Fc domain may be engineered to contain either a “knob” mutation, e.g., T366Y, or a “hole” mutation, e.g., Y407T, or both, to promote heterodimerization, or the Fc domain may be engineered to contain one or more modifications, e.g., point mutations, to provide any other modified Fc domain functionality.

[0045] FIGS. 11A-11D are schematic representations of exemplary fusion protein conjugates referred to as a Raptor antibody sialidase conjugate (FIG. 11A), a Janus antibody sialidase conjugate (FIG. 11B), a Lobster antibody sialidase conjugate (FIG. 11C), and a Bunk antibody sialidase conjugate (FIG. 11D).

[0046] FIG. 12 depicts an SDS-PAGE gel showing purified recombinant human Janus Trastuzumab under non-reducing and reducing conditions.

[0047] FIG. 13 depicts an SEC-HPLC trace of purified Janus Trastuzumab, showing approximately 90% monomer purity.

[0048] FIG. 14 depicts the enzyme activity of Janus Trastuzumab assayed using 4-MU-Neu5Ac as a substrate.

[0049] FIG. 15 depicts binding to HER2 antigen as determined by ForteBio Octet for Janus Trastuzumab (top), and trastuzumab (bottom). Equilibrium dissociation constants (KD) are indicated.

[0050] FIGS. 16A-D depict the testing of various configurations of antibody sialidase conjugates in a mouse syngeneic tumor model utilizing EMT6 mouse breast cancer cells engineered to express human Her2. Mice are treated via intraperitoneal injection of 10 mg/kg of each test article on the days marked with black triangles and tumor volume (mm³) recorded. Each line represents an individual mouse. Mice are treated with either trastuzumab (FIG. 16A), Raptor (FIG. 16B), Janus (FIG. 16C) or Lobster (FIG. 16D).

[0051] FIGS. 17A-D depict the testing of the Janus antibody sialidase conjugate in a mouse syngeneic tumor model utilizing EMT6 mouse breast cancer cells engineered to express human Her2. Mice were treated via intraperitoneal injection of 10 mg/kg of Janus on the days marked with black triangles and tumor volume (mm³) recorded. Mice were also treated on the same days as Janus with either anti-mouse NK1.1 (10 mg/kg) to deplete natural killer cells (FIG. 17A), liposomal clodronate (0.5 mg/ mouse, three times a week for two weeks) to deplete macrophages (FIG. 17B), or anti-mouse CD8α (10 mg/kg) to deplete CD8+ T cells (FIG. 17C). Each line represents an individual mouse. FIG. 17D depicts the mean tumor volume with error bars of the indicated treatment groups from Example 5.

[0052] FIGS. 18A-B depict the testing of the Janus antibody sialidase conjugate in a mouse syngeneic orthotopic tumor model utilizing a second source of EMT6 mouse breast cancer cells engineered to express human Her2. Mice are treated via intraperitoneal injection of 10 mg/kg of each test article on the days marked with black triangles and tumor volume (mm³) recorded. Each line represents an individual mouse. Mice are treated (Y) with either vehicle, trastuzumab, Janus or Janus Loss of Function (FIG. 18A). FIG. 18B depicts the rechallenge experiment of either the three mice treated with Janus from FIG. 18A with complete regressions of the original EMT6-Her2 tumors (cured mice) or naive mice. Cured mice were inoculated with either EMT6-Her2 cells or parental EMT6 cells on the left and right lower flank region. Naive mice were inoculated with EMT6-Her2 cells.

[0053] FIGS. 19A-B depict the testing of the Janus antibody sialidase conjugate in a mouse syngeneic orthotopic tumor model in combination with anti-mouse PD1. Mice are treated via intraperitoneal injection of 10 mg/kg of either anti-mouse PD1 alone (FIG. 19A) or Janus and anti-mouse PD1 (10 mg/kg of each, FIG. 19B) on the days marked with black triangles (▾) and tumor volume (mm³) recorded. Each line represents an individual mouse.

[0054] FIG. 20 depicts the testing of various test articles in a mouse syngeneic tumor model injected with a B16 melanoma cell line expressing human Her2. Mice are treated via intraperitoneal injection of 10 mg/kg of either Janus, trastuzumab or a combination of anti-mouse PD1 and anti-mouse CTLA4 (10 mg/kg of each) on the days marked with black triangles (▾) and tumor volume (mm³) recorded. Each line represents an individual mouse.

[0055] FIG. 21 depicts the testing of Janus Trastuzumab in a mouse syngeneic tumor model utilizing EMT6 mouse breast cancer cells engineered to express human Her2. Each line represents an individual mouse. Tick marks indicate dosing frequency (total of 5 doses, biweekly). Mice are treated with either Janus Trastuzumab or isotype control.

[0056] FIG. 22A depicts an SDS-PAGE gel showing Neu2-M173-Fc under non-reducing and reducing conditions. FIG. 22B is an SEC-HPLC trace of Neu2-M173-Fc. The monomer species has a retention time of 6.367 minutes. The monomer species has a purity of approximately 90% after purification by Protein A and CHT chromatography.

[0057] FIG. 23 depicts the enzyme activity of Neu2-M173-Fc, using 4-MU-Neu5Ac as the substrate, and fixing enzyme concentration to 2 μg/well.

[0058] FIG. 24A depicts an SDS-PAGE gel showing Neu2-M106 under non-reducing (NR) and reducing (R) conditions. FIG. 24B depicts a schematic representation of the Neu2 structure with the position of the R243 cleavage site indicated.

[0059] FIG. 25 depicts a reducing SDS-PAGE gel showing Neu2-M106 produced by a large or small scale expression with (+) or without (−) trypsin treatment.

[0060] FIG. 26 depicts an SDS-PAGE gel showing Neu2-M106 following incubation with trypsin and one of the protease inhibitors iron citrate (Fe Cit), aprotinin, AEBSF, leupeptin, or E-64 at the indicated concentrations.

[0061] FIG. 27 is a table depicting different mutations and combinations of mutations surrounding the trypsin cleavage site in Neu2.

[0062] FIG. 28A depicts a reducing SDS-PAGE analysis of Neu2 variants with the indicated mutation at position A242 with or without trypsin treatment. Trypsin digestion was for 5 minutes at 4° C. using a 5,000% dilution of trypsin. The digestion was quenched by addition of SDS, and 2 μg of protein was loaded on the gel. FIG. 28B depicts the enzymatic activity of Neu2 variants with the indicated mutation at position A242. FIG. 28C is an SEC-HPLC trace of Neu2 variants with the indicated mutation at position A242. Neu2-M106 (the mutational background in which the mutations at position A242 were tested) is shown as a control.

[0063] FIG. 29 depicts a reducing SDS-PAGE analysis of the indicated Neu2 variants with or without trypsin treatment. Neu2-M106 is shown as a control. For example, Neu2-M255 was shown to have a greater than 10 fold improved trypsin resistance relative to Neu2-M106.

### DETAILED DESCRIPTION

[0064] Various features and aspects of the invention are discussed in more detail below.

[0065] The invention relates to a recombinant human sialidase that comprises at least one mutation relative to a wild-type human sialidase, e.g., a substitution, deletion, or addition (insertion) of at least one amino acid. The mutations, or combination of mutations, can improve the expression, activity or both the expression and activity of the sialidase to improve its use in cancer diagnosis and/or treatment.

[0066] The invention further relates to fusion proteins and/or antibody conjugates comprising a sialidase enzyme and an antibody or portion thereof, e.g., an immunoglobulin Fc domain and/or an antigen-binding domain. The sialidase enzyme portion of the fusion protein and/or antibody conjugate may comprise at least one mutation relative to a wild-type human sialidase.

[0067] The invention further relates to pharmaceutical compositions and methods of using fusion proteins and/or antibody conjugates to treat cancer, e.g., a solid tumor, soft tissue tumor, hematopoietic tumor, metastatic lesion, or an epithelial cell cancer.

### I. Recombinant Human Sialidases

[0068] As used herein, the term “sialidase” refers to any enzyme, or a functional fragment thereof, that cleaves a terminal sialic acid residue from a substrate, for example, a glycoprotein or a glycolipid. The term sialidase includes variants having one or more amino acid substitutions, deletions, or insertions relative to a wild-type sialidase sequence, and/or fusion proteins or conjugates including a sialidase. Sialidases are also called neuraminidases, and, unless indicated otherwise, the two terms are used interchangeably herein. As used herein, the term “functional fragment” of a sialidase refers to fragment of a full-length sialidase that retains, for example, at least 10%, at least 20%, at least 30%, at least 40%, at least 50%, at least 60%, at least 70%, at least 80%, at least 90%, at least 95%, or 100% of the enzymatic activity of the corresponding full-length, naturally occurring sialidase. Sialidase enzymatic activity may be assayed by any method known in the art, including, for example, by measuring the release of sialic acid from the fluorogenic substrate 4-methylumbelliferyl-N-acetylneuraminic acid (4MU-NeuAc). In certain embodiments, the functional fragment comprises at least 100, 150, 200, 250, 300, 310, 320, 330, 340, 350, 360, or 370 consecutive amino acids present in a full-length, naturally occurring sialidase.

[0069] Four sialidases have been found in the human genome and are referred to as Neu1, Neu2, Neu3 and Neu4.

[0070] Human Neu1 is a lysosomal neuraminidase enzyme which functions in a complex with beta-galactosidase and cathepsin A. The amino acid sequence of human Neu1 is depicted in SEQ ID NO: 7, and a nucleotide sequence encoding human Neu1 is depicted in SEQ ID NO: 23.

[0071] Human Neu2 is a cytosolic sialidase enzyme. The amino acid sequence of human Neu2 is depicted in SEQ ID NO: 1, and a nucleotide sequence encoding human Neu2 is depicted in SEQ ID NO: 24. Unless stated otherwise, as used herein, wild-type human Neu2 refers to human Neu2 having the amino acid sequence of SEQ ID NO: 1.

[0072] Human Neu3 is a plasma membrane sialidase with an activity specific for gangliosides. Human Neu3 has two isoforms: isoform 1 and isoform 2. The amino acid sequence of human Neu3, isoform 1 is depicted in SEQ ID NO: 8, and a nucleotide sequence encoding human Neu3, isoform 1 is depicted in SEQ ID NO: 25. The amino acid sequence of human Neu3, isoform 2 is depicted in SEQ ID NO: 9, and a nucleotide sequence encoding human Neu3, isoform 2 is depicted in SEQ ID NO: 34.

[0073] Human Neu4 has two isoforms: isoform 1 is a peripheral membrane protein and isoform 2 localizes to the lysosome lumen. The amino acid sequence of human Neu4, isoform 1 is depicted in SEQ ID NO: 10, and a nucleotide sequence encoding human Neu4, isoform 1 is depicted in SEQ ID NO: 26. The amino acid sequence of human Neu4, isoform 2 is depicted in SEQ ID NO: 11, and a nucleotide sequence encoding human Neu4, isoform 2 is depicted in SEQ ID NO: 35.

[0074] Four sialidases have also been found in the mouse genome and are referred to as Neu1, Neu2, Neu3 and Neu4. The amino acid sequence of mouse Neu1 is depicted in SEQ ID NO: 38, and a nucleotide sequence encoding mouse Neu1 is depicted in SEQ ID NO: 42. The amino acid sequence of mouse Neu2 is depicted in SEQ ID NO: 39 and a nucleotide sequence encoding mouse Neu2 is depicted in SEQ ID NO: 43. The amino acid sequence of mouse Neu3 is depicted in SEQ ID NO: 40, and a nucleotide sequence encoding mouse Neu3 is depicted in SEQ ID NO: 44. The amino acid sequence of mouse Neu4 is depicted in SEQ ID NO: 41, and a nucleotide sequence encoding mouse Neu4 is depicted in SEQ ID NO: 45.

[0075] Exemplary prokaryotic sialidases include sialidases from Salmonella typhimurium and Vibrio cholera. The amino acid sequence of Salmonella typhimurium sialidase (St-sialidase) is depicted in SEQ ID NO: 30, and a nucleotide sequence encoding Salmonella typhimurium sialidase is depicted in SEQ ID NO: 6. The amino acid sequence of Vibrio cholera sialidase is depicted in SEQ ID NO: 36, and a nucleotide sequence encoding Vibrio cholera sialidase is depicted in SEQ ID NO: 37.

[0076] In certain embodiments, a recombinant mutant human sialidase has about 5%, about 10%, about 15%, about 20%, about 25%, about 30%, about 35%, about 40%, about 45%, about 50%, about 55%, about 60%, about 65%, about 70%, about 75%, about 80%, about 85%, about 90%, about 95%, about 100%, or more than 100% of the enzymatic activity of a corresponding (or template) wild-type human sialidase.

[0077] In certain embodiments, the recombinant mutant human sialidase has the same substrate specificity as the corresponding wild-type human sialidase. In other embodiments, the recombinant mutant human sialidase has a different substrate specificity than the corresponding wild-type human sialidase. For example, in certain embodiments the recombinant mutant human sialidase can cleave α2,3, α2,6, and/or α2,8 linkages. In certain embodiments the sialidase can cleave α2,3 and α2,8 linkages.

[0078] In certain embodiments, the expression yield of the recombinant mutant human sialidase in mammalian cells, e.g., HEK293 cells, CHO cells, murine myeloma cells (NSO, Sp2/0), or human fibrosarcoma cells (HT-1080), e.g., HEK293 cells, is greater than about 10%, about 20%, about 50%, about 75%, about 100%, about 150%, about 200%, about 250%, about 300%, about 400%, about 500%, about 600%, about 700%, about 800%, about 900%, or about 1,000% of the expression yield of the corresponding wild-type human sialidase.

[0079] In certain embodiments, the recombinant mutant human sialidase has about 5%, about 10%, about 15%, about 20%, about 25%, about 30%, about 35%, about 40%, about 45%, about 50%, about 55%, about 60%, about 65%, about 70%, about 75%, about 80%, about 85%, about 90%, about 95%, about 100%, or more than 100% of the enzymatic activity of a corresponding wild-type human sialidase, and the expression yield of the recombinant mutant human sialidase in mammalian cells, e.g., HEK293 cells, is greater than about 10%, about 20%, about 50%, about 75%, about 100%, about 150%, about 200%, about 250%, about 300%, about 400%, about 500%, about 600%, about 700%, about 800%, about 900%, or about 1,000% of the expression yield of a corresponding wild-type human sialidase.

[0080] In certain embodiments, the amino acid sequence of the recombinant mutant human sialidase has at least 50%, 55%, 60%, 65%, 70%, 75%, 80%, 85%, 90%, 95%, 96%, 97%, 98%, or 99% sequence identity to the amino acid sequence of a corresponding wild-type human sialidase.

[0081] a. Substitution of Cysteine Residues

[0082] In certain embodiments, the recombinant mutant human sialidase comprises a substitution of at least one cysteine (cys, C) residue. It has been discovered that certain cysteine residues in sialidases may inhibit expression of functional protein as a result of protein aggregation. Accordingly, in certain embodiments, the recombinant mutant human sialidase contains at least one mutation to remove a free cysteine (e.g., for Neu1 (SEQ ID NO: 7), a mutation of, for example, one or more of C111, C117, C171, C183, C218, C240, C242, and C252; for Neu2 (SEQ ID NO: 1), a mutation of, for example, one or more of C125, C196, C219, C272, C332, and C352; for Neu3 (SEQ ID NO: 8), a mutation of, for example, one or more of C7, C90, C99, C106, C127, C136, C189, C194, C226, C242, C250, C273, C279, C295, C356, C365, C368, C384, C383, C394, and C415; and for Neu4 (SEQ ID NO: 10), a mutation of, for example, one or more of C88, C125, C126, C186, C191, C211, C223, C239, C276, C437, C453, C480, and C481). Free cysteines can be substituted with any amino acid. In certain embodiments, the free cysteine is substituted with serine (ser, S), isoleucine (iso, I), valine (val, V), phenylalanine (phe, F), leucine (leu, L), or alanine (ala, A). Exemplary cysteine substitutions in Neu2 include C125A, C125I, C125S, C125V, C196A, C196L, C196V, C272S, C272V, C332A, C332S, C332V, C352L, and C352V.

[0083] In certain embodiments, the recombinant mutant human sialidase comprises two or more cysteine substitutions. Exemplary double or triple cysteine substitutions in Neu2 include: C125S and C332S; C272V and C332A; C272V and C332S; C332A and C352L; C125S and C196L; C196L and C352L; C196L and C332A; C332A and C352L; and C196L, C332A and C352L.

[0084] In certain embodiments, the recombinant mutant human sialidase is a Neu2 sialidase and comprises the substitutions C322A and C352L (SEQ ID NO: 5).

[0085] In certain embodiments, the sialidase contains an amino acid substitution at 2, 3, 4, 5, or 6 cysteines typically present in a human sialidase, e.g., Neu2 or Neu3.

[0086] In certain embodiments, the recombinant mutant human sialidase comprises a substitution or combination of substitutions corresponding to a substitution or combination of substitutions listed in TABLE 1 (amino acid positions corresponding to wild-type human Neu2 (SEQ ID NO: 1)).

TABLE 1
Substitution(s)
C125A
C125I
C125S
C125V
C196A
C196L
C196V
C272S
C272V
C332A
C332S
C332V
C352L
C352V
C125S + C332S
C272V + C332A
C272V + C332S
C332A + C352L
C125S + C196L
C196L + C352L
C196L + C332A
C196L + C332A + C352L

[0087] b. Substitutions of Residues to Increase pI and/or Decrease Hydrophobicity

[0088] The isoelectric point (pI) of a protein is the pH at which the net charge is zero. The pI also generally indicates the pH at which the protein is least soluble, which may affect the ability to express and purify the protein. Generally, a protein has good solubility if its pI is greater than 2 units above the pH of the solution. Human Neu2 has a predicted pI of 7.5. Thus, human Neu2 is least soluble around neutral pH, which is undesirable because expression and physiological systems are at neutral pH. In contrast, the sialidase from Salmonella typhimurium (St-sialidase), which exhibits good solubility and recombinant expression, has a pI of 9.6. Accordingly, to increase expression of human Neu2 or the other human sialidases, a recombinant mutant human sialidase may be designed to contain one or more amino acid substitution(s) wherein the substitution(s) increase(s) the pI of the sialidase relative to a sialidase without the substitution. Additionally, decreasing the number of hydrophobic amino acids on the surface of a sialidase may improve expression of sialidase by, for example, reducing aggregation. Accordingly, to increase expression of human Neu2 or the other human sialidases, a recombinant mutant human sialidase may be designed to contain one or more amino acid substitution(s) wherein the substitution(s) decrease(s) the hydrophobicity of a surface of the sialidase relative to a sialidase without the substitution(s).

[0089] Accordingly, in certain embodiments, the recombinant mutant human sialidase comprises at least one amino acid substitution, wherein the substitution increases the isoelectric point (pI) of the sialidase and/or decreases the hydrophobicity of the sialidase relative to a sialidase without the substitution. This may be achieved by introducing one or more charged amino acids, for example, positively or negatively charged amino acids, into the recombinant sialidase. In certain embodiments, the amino acid substitution is to a charged amino acid, for example, a positively charged amino acid such as lysine (lys, K), histidine (his, H), or arginine (arg, R), or a negatively charged amino acid such as aspartic acid (asp, D) or glutamic acid (glu, E). In certain embodiments, the amino acid substitution is to a lysine residue. In certain embodiments, the substitution increases the pI of the sialidase to about 7.75, about 8, about 8.25, about 8.5, about 8.75, about 9, about 9.25, about 9.5, or about 9.75.

[0090] In certain embodiments, the amino acid substitution occurs at a surface exposed D or E amino acid, in a helix or loop, or in a position that has a K or R in the corresponding position of St-sialidase. In certain embodiments, the amino acid substitution occurs at an amino acid that is remote from the catalytic site or otherwise not involved in catalysis, an amino acid that is not conserved with the other human Neu proteins or with St-Sialidase or Clostridium NanH, or an amino acid that is not located in a domain important for function (e.g., an Asp-box or beta strand).

[0091] Exemplary amino acid substitutions in Neu2 that increase the isoelectric point (pI) of the sialidase and/or decrease the hydrophobicity of the sialidase relative to a sialidase without the substitution include A2E, A2K, D215K, V325E, V325K, E257K, and E319K. In certain embodiments, the recombinant mutant human sialidase comprises two or more amino acid substitutions, including, for example, A2K and V325E, A2K and V325K, E257K and V325K, A2K and E257K, and E257K and A2K and V325K.

[0092] In certain embodiments, the recombinant mutant human sialidase comprises a substitution or combination of substitutions corresponding to a substitution or combination of substitutions listed in TABLE 2 (amino acid positions corresponding to wild-type human Neu2 (SEQ ID NO: 1)).

```
TABLE 2
Substitution(s)
A2K
E72K
D215K
E257K
V325K
  A2K + E257K
  A2K + V325E
  A2K + V325K
E257K + V325K
```

[0093] c. Addition of N-terminal Peptides and N- or C-terminal Substitutions

[0094] It has been discovered that the addition of a peptide sequence of two or more amino acids to the N-terminus of a human sialidase can improve expression and/or activity of the sialidase. In certain embodiments, the peptide is at least 2 amino acids in length, for example, from 2 to 20, from 2 to 10, from 2 to 5, or 2, 3, 4, 5, 6, 7, 8, 9, 10, 11, 12, 13, 14, 15, 16, 17, 18, 19, or 20 amino acids in length. In certain embodiments, the peptide may form, or have a propensity to form, an a-helix.

[0095] In mice, a Neu2 isoform (type B) found in thymus contains six amino acids not present in the canonical isoform of Neu2 found in skeletal muscle. In certain embodiments herein, the N-terminal six amino acids of the mouse thymus Neu2 isoform, MEDLRP (SEQ ID NO: 4), or variations thereof, can be added onto a human Neu, e.g., human Neu2. In certain embodiments, the recombinant mutant human sialidase comprises a peptide at least two amino acid residues in length covalently associated with an N-terminal amino acid of the sialidase. In certain embodiments the recombinant mutant human sialidase comprises the peptide MEDLRP (SEQ ID NO: 4) or EDLRP (SEQ ID NO: 3) covalently associated with an N-terminal amino acid of the sialidase. In certain embodiments, the sialidase may further comprise a cleavage site, e.g., a proteolytic cleavage site, located between the peptide, e.g., MEDLRP (SEQ ID NO: 4) or EDLRP (SEQ ID NO: 3), and the remainder of the sialidase. In certain embodiments, the peptide, e.g., MEDLRP (SEQ ID NO: 4) or EDLRP (SEQ ID NO: 3), may be post-translationally cleaved from the remainder of the sialidase.

[0096] Alternatively to, or in combination with, the N-terminal addition, 1-5 amino acids of the 12 amino acid N-terminal region of the recombinant mutant human sialidase may be removed, e.g., the N-terminal methionine can be removed. In certain embodiments, if the recombinant mutant human sialidase is Neu2, the N-terminal methionine can be removed, the first five amino acids (MASLP; SEQ ID NO: 12) can be removed, or the second through fourth amino acids (ASLP; SEQ ID NO: 13) can be removed.

[0097] In certain embodiments, 1-5 amino acids of the 12 amino acid N-terminal region of the recombinant mutant human sialidase are substituted with MEDLRP (SEQ ID NO: 4), EDLRP (SEQ ID NO: 3), or TVEKSVVF (SEQ ID NO: 14). For example, in certain embodiments, if the recombinant mutant human sialidase is Neu2, the amino acids MASLP (SEQ ID NO: 12), ASLP (SEQ ID NO: 13) or M are substituted with MEDLRP (SEQ ID NO: 4), EDLRP (SEQ ID NO: 3) or TVEKSVVF (SEQ ID NO: 14).

[0098] Human sialidases have a β-propeller structure, characterized by 6 blade-shaped β-sheets arranged toroidally around a central axis. Generally, hydrophobic interactions between the blades of a β-propeller, including between the N- and C-terminal blades, enhance stability. Accordingly, in order to increase expression of human Neu2 or the other human sialidases, a recombinant mutant human sialidase can be designed comprising an amino acid substitution that increases hydrophobic interactions and/or hydrogen bonding between the N- and C-terminal β-propeller blades of the sialidase.

[0099] Accordingly, in certain embodiments, the recombinant mutant human sialidase comprises a substitution of at least one wild-type amino acid residue, wherein the substitution increases hydrophobic interactions and/or hydrogen bonding between the N- and C-termini of the sialidase relative to a sialidase without the substitution. In certain embodiments, the wild-type amino acid is substituted with asparagine (asn, N), lysine (lys, K), tyrosine (tyr, Y), phenylalanine (phe, F), or tryptophan (trp, W). Exemplary substitutions in Neu2 that increase hydrophobic interactions and/or hydrogen bonding between the N- and C-termini include L4N, L4K, V6Y, L7N, L4N and L7N, L4N and V6Y and L7N, V12N, V12Y, V12L, V6Y, V6F, or V6W. In certain embodiments, the sialidase comprises the V6Y substitution.

[0100] In certain embodiments, the recombinant mutant human sialidase comprises a combination of the above substitutions. For example, a recombinant mutant human Neu2 sialidase can comprise the additional amino acids MEDLRP (SEQ ID NO: 4), EDLRP (SEQ ID NO: 3), or TVEKSVVF (SEQ ID NO: 14) at the N-terminus and, in combination, can comprise at least one L4N, L4K, V6Y, L7N, L4N and L7N, L4N and V6Y and L7N, V12N, V12Y, V12L, V6Y, V6F, or V6W substitution. In certain embodiments, the amino acids MASLP (SEQ ID NO: 12), ASLP (SEQ ID NO: 13) or M of a recombinant mutant human Neu2 sialidase are replaced with MEDLRP (SEQ ID NO: 4), EDLRP (SEQ ID NO: 3) or TVEKSVVF (SEQ ID NO: 14) and the recombinant mutant human Neu2 sialidase also comprises at least one L4N, L4K, V6Y, L7N, L4N and L7N, L4N and V6Y and L7N, V12N, V12Y, V12L, V6Y, V6F, or V6W substitution.

[0101] In certain embodiments, the recombinant mutant human sialidase comprises a mutation or combination of mutations corresponding to a mutation or combination of mutations listed in TABLE 3 (amino acid positions corresponding to wild-type human Neu2 (SEQ ID NO: 1)).

TABLE 3
Mutation(s)

Substitute M at the N-terminus with EDLRP (SEQ
ID NO: 3)
Substitute M at the N-terminus with MEDLRP (SEQ
ID NO: 4)
Insert MEDLRP (SEQ ID NO: 4) at the N-terminus
Substitute MASLP (SEQ ID NO: 12) at the N-terminus
with MEDLRP (SEQ ID NO: 4)
L4N
V6Y
L7N
V6F
V6W

[0102] Additionally, in certain embodiments, the sialidase comprises a substitution or deletion of an N-terminal methionine at the N-terminus of the sialidase. For example, in certain embodiments, the sialidase comprises a substitution of a methionine residue at a position corresponding to position 1 of wild-type human Neu2 (SEQ ID NO: 1), e.g., the methionine at a position corresponding to position 1 of wild-type human Neu2 is substituted by alanine (M1A) or aspartic acid (M1D). In other embodiments, the sialidase comprises a deletion of a methionine residue at a position corresponding to position 1 (ΔM1) of wild-type human Neu2 (SEQ ID NO: 1).

[0103] In certain embodiments, the recombinant mutant human sialidase comprises a substitution or combination of substitutions corresponding to a substitution or combination of substitutions listed in TABLE 4 (amino acid positions corresponding to wild-type human Neu2 (SEQ ID NO: 1)).

TABLE 4
Mutation(s)
Deletion of M1, V6Y, I187K
M1R, V6Y, I187K
M1H, V6Y, I187K
M1K, V6Y, I187K
M1D, V6Y, I187K
M1T, V6Y, I187K
M1N, V6Y, I187K
M1Q, V6Y, I187K
M1G, V6Y, I187K
MIA, V6Y, I187K
M1V, V6Y, I187K
M1L, V6Y, I187K
M1F, V6Y, I187K
M1Y, V6Y, I187K

[0104] d. Substitutions of Residues to Decrease Proteolytic Cleavage

[0105] It has been discovered that certain sialidases (e.g., human Neu2) are susceptible to cleavage by a protease (e.g., trypsin). As a result, proteolytic cleavage of the sialidase may occur during recombinant protein production, harvesting, purification, or formulation, during administration to a subject, or after administration to a subject. Accordingly, in certain embodiments, the recombinant mutant human sialidase comprises a substitution of at least one wild-type amino acid residue, wherein the substitution decreases cleavage of the sialidase by a protease (e.g., trypsin) relative to a sialidase without the substitution.

[0106] In certain embodiments, incubation of the recombinant mutant human sialidase with a protease (e.g., trypsin) results in from about 1% to about 50%, from about 1% to about 40%, from about 1%, to about 30%, from about 1% to about 20%, from about 1% to about 10%, from about 1% to about 5%, from about 5% to about 50%, from about 5% to about 40%, from about 5% to about 30%, from about 5% to about 20%, from about 5% to about 10%, from about 10% to about 50%, from about 10% to about 40%, from about 10% to about 30%, from about 10% to about 20%, from about 20% to about 50%, from about 20% to about 40%, from about 20% to about 30%, from about 30% to about 50%, from about 30% to about 40%, or from about 40% to about 50% of the proteolytic cleavage of a corresponding wild-type sialidase when incubated with the protease under the same conditions. In certain embodiments, incubation of the recombinant mutant human sialidase with a protease (e.g., trypsin) results in less than 50%, less than 40%, less than 30%, less than 10%, less than 5%, less than 3%, less than 1%, or less than 0.5% of the proteolytic cleavage of a corresponding wild-type sialidase when incubated with the protease under the same conditions. Proteolytic cleavage can be assayed by any method known in the art, including for example, by SDS-PAGE as described in Example 5 herein.

[0107] Exemplary substitutions that increase resistance to proteolytic cleavage include: (i) a substitution of an alanine residue at a position corresponding to position 242 of wild-type human Neu2 (SEQ ID NO: 1), e.g., a substitution by cysteine (A242C), phenylalanine (A242F), glycine (A242G), histidine (A242H), isoleucine (A242I), lysine (A242K), leucine (A242L), methionine (A242M), asparagine (A242N), glutamine (A242Q), arginine (A242R), serine (A242S), valine (A242V), tryptophan (A242W), or tyrosine (A242Y); (ii) a substitution of an arginine residue at a position corresponding to position 243 of wild-type human Neu2 (SEQ ID NO: 1), e.g., a substitution by glutamic acid (R243E), histidine (R243H), asparagine (R243N), glutamine (R243Q), or lysine (R243K); (iii) a substitution of a valine residue at a position corresponding to position 244 of wild-type human Neu2 (SEQ ID NO: 1), e.g., a substitution by isoleucine (V244I), lysine (V244K), or proline (V244P); or (iv) a combination of any of the foregoing. In certain embodiments, the recombinant mutant human sialidase comprises a substitution selected from A242C, A242F, A242Y, and A242W. In certain embodiments, the recombinant mutant human sialidase comprises a substitution or combination of substitutions corresponding to a substitution or combination of substitutions listed in TABLE 5 (amino acid positions corresponding to wild-type human Neu2 (SEQ ID NO: 11)).

TABLE 5

| Wild Type | |
|---|---|
| Human Neu2 | |
| (SEQ ID NO: 1) | |
| Amino Acid | Exemplary Substitution(s) at Specified Position(s) |
| A242 | C, F, G, H, I, K, L, M, N, P, Q, R, S, V, W, Y |
| R243 | E, H, N, Q, K |
| V244 | I, K, P |

[0108] Additional exemplary substitutions that increase resistance to proteolytic cleavage (and/or increase expression yield and/or enzymatic activity) include: (i) a substitution of a leucine residue at a position corresponding to position 240 of wild-type human Neu2 (SEQ ID NO: 1), e.g., a substitution by aspartic acid (L240D), asparagine (L240N), or tyrosine (L240Y); (ii) a substitution of an alanine residue at a position corresponding to position 213 of wild-type human Neu2 (SEQ ID NO: 1), e.g., a substitution by cysteine (A213C), asparagine (A213N), serine (A213S), or threonine (A213T); (iii) a substitution of an arginine residue at a position corresponding to position 241 of wild-type human Neu2 (SEQ ID NO: 1), e.g., a substitution by alanine (R241A), aspartic acid (R241D), leucine (R241L), glutamine (R241Q). or tyrosine (R241Y); (iv) a substitution of a serine residue at a position corresponding to position 258 of wild-type human Neu2 (SEQ ID NO: 1), e.g., a substitution by cysteine (S258C); (v) a substitution of a leucine residue at a position corresponding to position 260 of wild-type human Neu2 (SEQ ID NO: 1), e.g., a substitution by aspartic acid (L260D), phenylalanine (L260F), glutamine (L260Q), or threonine (L260T); (vi) a substitution of a valine residue at a position corresponding to position 265 of wild-type human Neu2 (SEQ ID NO: 1), e.g., a substitution by phenylalanine (V265F); or (vii) a combination of any of the foregoing. It is contemplated that, in certain embodiments, a substitution or a combination of substitutions at these positions may improve hydrophobic and/or aromatic interaction between secondary structure elements in the sialidase (e.g., between an a-helix and the nearest (3-sheet) thereby stabilizing the structure and improving resistance to proteolytic cleavage.

[0109] In certain embodiments, the recombinant mutant sialidase comprises a mutation at position L240. In certain embodiments, the recombinant mutant sialidase comprises a combination of mutations at positions (i) A213 and A242, (ii) A213, A242, and S258, (iii) L240 and L260, (iv) R241 and A242, (v) A242 and L260, (vi) A242 and V265, or (vii) L240 and A242. In certain embodiments, the recombinant mutant human sialidase comprises a combination of substitutions selected from (i) A213C, A242F, and S258C, (ii) A213C and A242F, (iii) A213T and A242F, (iv) R241Y and A242F, and (v) L240Y and A242F. In certain embodiments, the recombinant mutant human sialidase comprises a substitution or combination of substitutions corresponding to a substitution or combination of substitutions listed in TABLE 6 (amino acid positions corresponding to wild-type human Neu2 (SEQ ID NO: 1)).

TABLE 6
Substitution(s)
A242C, V244P
A242R, V244R
A242R, V244H
A242Y, V244P
A242T, V244P
A242N, V244P
A213C, A242F
A213S, A242F
A213T, A242F
A213N, A242F
A213C, A242F, S258C
A242F, L260F
A242F, V265F
L240Y
L240Y, L260F
L240D, L260T
L240N, L260T
L240N, L260D
L240N, L260Q
L240Y, A242F
R241A, A242F
R241Y, A242F

[0110] e. Other Substitutions

[0111] The invention further provides a recombinant mutant human sialidase comprising at least one of the following substitutions: I187K, A328E, K370N, or H210N. In certain embodiments, a recombinant mutant human Neu2 comprises the substitution of the amino acids GDYDAPTHQVQW (SEQ ID NO: 15) with the amino acids SMDQGSTW (SEQ ID NO: 16) or STDGGKTW (SEQ ID NO: 17). In certain embodiments, a recombinant mutant human Neu2 comprises the substitution of the amino acids PRPPAPEA (SEQ ID NO: 18) with the amino acids QTPLEAAC (SEQ ID NO: 19). In certain embodiments, a recombinant mutant human Neu2 comprises the substitution of the amino acids NPRPPAPEA (SEQ ID NO: 20) with the amino acids SQNDGES (SEQ ID NO: 21).

[0112] The invention further provides a recombinant mutant human sialidase comprising at least one substitution at a position corresponding to V212, A213, Q214, D215, T216, L217, E218, C219, Q220, V221, A222, E223, V224, E225, or T225.

[0113] The invention further provides a recombinant mutant human sialidase comprising an amino acid substitution at a position identified in TABLE 7 (amino acid positions corresponding to wild-type human Neu2 (SEQ ID NO: 1). In certain embodiments, the sialidase comprises an amino acid substitution identified in TABLE 7. In certain embodiments, the sialidase comprises a combination of any amino acid substitutions identified in TABLE 7.

TABLE 7

| Wild Type | |
|---|---|
| Human Neu2 | |
| (SEQ ID NO: 1) | Exemplary Substitution(s) at Specified |
| Amino Acid | Position(s) |
| M1 | D |
| L4 | S, T, Y, L, F, A, P, V, I, N, D, or H |
| P5 | G |
| V6 | Y |
| L7 | F, Y, S, I, T, or N |
| K9 | D |
| V12 | L, A, P, V, N, D, or H |
| F13 | S, N, R, K, T, G, D, E, or A |
| I22 | S, N, R, K, T, G, D, E, A, Y, L, F, P, V, I, or H |
| A24 | S, N, R, K, T, G, D, E, A, Y, L, F, P, V, I, or H |
| L34 | S, T, Y, L, F, A, P, V, I, N, D, or H |
| A36 | S, T, Y, L, F, A, P, V, I, N, D, or H |
| K44 | R or E |
| K45 | A, E, or R |
| L54 | M |
| P62 | H, G, N, T, S, F, I, D, or E |
| H64 | F, Y, S, I, T, or N |
| Q69 | H |
| R78 | K |
| D80 | P |
| P89 | S, T, Y, L, F, A, P, V, I, N, D, H, or M |
| A93 | E or K |
| G107 | D |
| Q108 | H |
| Q112 | R or K |
| C125 | Y, F, or L |
| Q126 | E, F, H, I, L, or Y |
| A150 | V |
| T156 | R, N, D, C, G, H, I, L, F, S, Y, V, A, P, or T |
| F157 | R, N, D, C, G, H, I, L, F, S, Y, V, A, or P |
| A158 | R, N, D, C, G, H, I, L, F, S, Y, V, A, P, or T |
| V159 | R, N, D, C, G, H, I, L, F, S, Y, V, A, or P |
| G160 | R, N, D, C, G, H, I, L, F, S, Y, V, A, P, or T |
| P161 | R, N, D, C, G, H, I, L, F, S, Y, V, A, or P |
| G162 | R, N, D, C, G, H, I, L, F, S, Y, V, A, P, or T |
| H163 | R, N, D, C, G, H, I, L, F, S, Y, V, A, or P |
| C164 | R, N, D, C, G, H, I, L, F, S, Y, V, A, P, or T |
| L165 | R, N, D, C, G, H, I, L, F, S, Y, V, A, or P |
| R170 | P |
| A171 | G |
| V176 | R, N, D, C, G, H, I, L, F, S, Y, V, P, or A |
| P177 | S, T, Y, L, F, A, P, V, I, N, D, or H |
| A178 | S, T, Y, L, F, A, P, V, I, N, D, or H |
| L184 | S, N, R, K, T, G, D, E, A, F, H, I, L, P, V, or Y |
| H185 | S, N, R, K, T, G, D, E, or A |
| P186 | S, N, R, K, T, G, D, E, A, F, H, I, L, P, V, or Y |
| I187 | S, N, R, K, T, G, D, E, or A |
| Q188 | P, S, N, R, K, T, G, D, E, or A |
| R189 | P |
| P190 | F, M, A, D, G, H, N, P, R, S, or T |
| I191 | M, A, D, F, H, I, L, N, P, S, T, V, Y, E, G, K, or R |
| A194 | S, T, Y, L, F, A, P, V, I, N, D, or H |
| A213 | C, N, S, or T |
| L217 | R, N, D, C, G, H, I, L, F, S, Y, or V |
| C219 | R, N, D, C, G, H, I, L, F, S, Y, or V |
| A222 | D |
| E225 | P |
| H239 | P |
| L240 | D, N, or Y |
| R241 | A, D, L, Q, or Y |
| A242 | C, F, G, H, I, K, L, M, N, Q, R, S, V, W, or Y |
| V244 | I or P |
| T249 | A |
| D251 | G |
| E257 | P |
| S258 | C |
| L260 | D, F, Q, or T |
| V265 | F |
| Q270 | S, T, A, H, P, or F |
| G271 | S, N, R, K, T, G, D, E, or A |
| C272 | S, N, R, K, T, G, D, E, A, C, H, Y, F, H, L, P, or V |
| W292 | R |
| S301 | A, D, E, F, G, H, I, K, L, M, N, P, Q, T, V, W, Y, |
| | C, or R |
| W302 | A, D, E, F, G, H, I, L, M, N, P, Q, R, S, T, V, Y, |
| | or K |
| E319 | D |
| V325 | F, Y, S, I, T, N, A, D, H, L, P, or V |
| L326 | F, Y, S, I, T, N, A, D, H, L, P, or V |
| L327 | F, Y, S, I, T, N, A, D, H, L, P, or V |
| C332 | A, D, G, H, N, P, R, S, or T |
| Y359 | A or S |
| V363 | R, S, T, Y, L, F, A, P, V, I, N, D, or H |
| L365 | K, Q, F, Y, S, I, T, N, A, D, H, L, P, or V |

[0114] For example, in certain embodiments, the recombinant mutant human sialidase comprises: (a) a substitution of a proline residue at a position corresponding to position 5 of wild-type human Neu2 (P5); (b) a substitution of a lysine residue at a position corresponding to position 9 of wild-type human Neu2 (K9); (c) a substitution of a lysine residue at a position corresponding to position 44 of wild-type human Neu2 (K44); (d) a substitution of a lysine residue at a position corresponding to position 45 of wild-type human Neu2 (K45); (e) a substitution of a leucine residue at a position corresponding to position 54 of wild-type human Neu2 (L54); (f) a substitution of a proline residue at a position corresponding to position 62 of wild-type human Neu2 (P62); (g) a substitution of a glutamine residue at a position corresponding to position 69 of wild-type human Neu2 (Q69); (h) a substitution of an arginine residue at a position corresponding to position 78 of wild-type human Neu2 (R78); (i) a substitution of an aspartic acid residue at a position corresponding to position 80 of wild-type human Neu2 (D80); (j) a substitution of an alanine residue at a position corresponding to position 93 of wild-type human Neu2 (A93); (k) a substitution of a glycine residue at a position corresponding to position 107 of wild-type human Neu2 (G107); (l) a substitution of a glutamine residue at a position corresponding to position 108 of wild-type human Neu2 (Q108); (m) a substitution of a glutamine residue at a position corresponding to position 112 of wild-type human Neu2 (Q112); (n) a substitution of a cysteine residue at a position corresponding to position 125 of wild-type human Neu2 (C125); (o) a substitution of a glutamine residue at a position corresponding to position 126 of wild-type human Neu2 (Q126); (p) a substitution of an alanine residue at a position corresponding to position 150 of wild-type human Neu2 (A150); (q) a substitution of a cysteine residue at a position corresponding to position 164 of wild-type human Neu2 (C164); (r) a substitution of an arginine residue at a position corresponding to position 170 of wild-type human Neu2 (R170); (s) a substitution of an alanine residue at a position corresponding to position 171 of wild-type human Neu2 (A171); (t) a substitution of a glutamine residue at a position corresponding to position 188 of wild-type human Neu2 (Q188); (u) a substitution of an arginine residue at a position corresponding to position 189 of wild-type human Neu2 (R189); (v) a substitution of an alanine residue at a position corresponding to position 213 of wild-type human Neu2 (A213); (w) a substitution of a leucine residue at a position corresponding to position 217 of wild-type human Neu2 (L217); (x) a substitution of a glutamic acid residue at a position corresponding to position 225 of wild-type human Neu2 (E225); (y) a substitution of a histidine residue at a position corresponding to position 239 of wild-type human Neu2 (H239); (z) a substitution of a leucine residue at a position corresponding to position 240 of wild-type human Neu2 (L240); (aa) a substitution of an arginine residue at a position corresponding to position 241 of wild-type human Neu2 (R241); (bb) a substitution of an alanine residue at a position corresponding to position 242 of wild-type human Neu2 (A242); (cc) a substitution of a valine residue at a position corresponding to position 244 of wild-type human Neu2 (V244); (dd) a substitution of a threonine residue at a position corresponding to position 249 of wild-type human Neu2 (T249); (ee) a substitution of an aspartic acid residue at a position corresponding to position 251 of wild-type human Neu2 (D251); (ff) a substitution of a glutamic acid residue at a position corresponding to position 257 of wild-type human Neu2

[0115] (E257); (gg) a substitution of a serine residue at a position corresponding to position 258 of wild-type human Neu2 (S258); (hh) a substitution of a leucine residue at a position corresponding to position 260 of wild-type human Neu2 (L260); (ii) a substitution of a valine residue at a position corresponding to position 265 of wild-type human Neu2 (V265); (jj) a substitution of a glutamine residue at a position corresponding to position 270 of wild-type human Neu2 (Q270); (kk) a substitution of a tryptophan residue at a position corresponding to position 292 of wild-type human Neu2 (W292); (ll) a substitution of a serine residue at a position corresponding to position 301 of wild-type human Neu2 (S301); (mm) a substitution of a tryptophan residue at a position corresponding to position 302 of wild-type human Neu2 (W302); (nn) a substitution of a valine residue at a position corresponding to position 363 of wild-type human Neu2 (V363); or (oo) a substitution of a leucine residue at a position corresponding to position 365 of wild-type human Neu2 (L365); or a combination of any of the foregoing substitutions. For example, the sialidase may comprise a substitution of K9, P62, A93, Q216, A242, Q270, S301, W302, V363, or L365, or a combination of any of the foregoing substitutions.

[0116] In certain embodiments, in the sialidase: (a) the proline residue at a position corresponding to position 5 of wild-type human Neu2 is substituted by histidine (P5H); (b) the lysine residue at a position corresponding to position 9 of wild-type human Neu2 is substituted by aspartic acid (K9D); (c) the lysine residue at a position corresponding to position 44 of wild-type human Neu2 is substituted by arginine (K44R) or glutamic acid (K44E); (d) the lysine residue at a position corresponding to position 45 of wild-type human Neu2 is substituted by alanine (K45A), arginine (K45R), or glutamic acid (K45E); (e) the leucine residue at a position corresponding to position 54 of wild-type human Neu2 is substituted by methionine (L54M); (f) the proline residue at a position corresponding to position 62 of wild-type human Neu2 is substituted by asparagine (P62N), aspartic acid (P62D), histidine (P62H), glutamic acid (P62E), glycine (P62G), serine (P62S), or threonine (P62T); (g) the glutamine residue at a position corresponding to position 69 of wild-type human Neu2 is substituted by histidine (Q69H); (h) the arginine residue at a position corresponding to position 78 of wild-type human Neu2 is substituted by lysine (R78K); (i) the aspartic acid residue at a position corresponding to position 80 of wild-type human Neu2 is substituted by proline (D8OP); (j) the alanine residue at a position corresponding to position 93 of wild-type human Neu2 is substituted by glutamic acid (A93E) or lysine (A93K); (k) the glycine residue at a position corresponding to position 107 of wild-type human Neu2 is substituted by aspartic acid (G107D); (l) the glutamine residue at a position corresponding to position 108 of wild-type human Neu2 is substituted by histidine (Q108H); (m) the glutamine residue at a position corresponding to position 112 of wild-type human Neu2 is substituted by arginine (Q112R) or lysine (Q112K); (n) the cysteine residue at a position corresponding to position 125 of wild-type human Neu2 is substituted by leucine (C125L); (o) the glutamine residue at a position corresponding to position 126 of wild-type human Neu2 is substituted by leucine (Q126L), glutamic acid (Q126E), phenylalanine (Q126F), histidine (Q126H), isoleucine (Q126I), or tyrosine (Q126Y); (p) the alanine residue at a position corresponding to position 150 of wild-type human Neu2 is substituted by valine (A150V); (q) the cysteine residue at a position corresponding to position 164 of wild-type human Neu2 is substituted by glycine (C164G); (r) the arginine residue at a position corresponding to position 170 of wild-type human Neu2 is substituted by proline (R170P); (s) the alanine residue at a position corresponding to position 171 of wild-type human Neu2 is substituted by glycine (A171G); (t) the glutamine residue at a position corresponding to position 188 of wild-type human Neu2 is substituted by proline (Q188P); (u) the arginine residue at a position corresponding to position 189 of wild-type human Neu2 is substituted by proline (R189P); (v) the alanine residue at a position corresponding to position 213 of wild-type human Neu2 is substituted by cysteine (A213C), asparagine (A213N), serine (A213S), or threonine (A213T); (w) the leucine residue at a position corresponding to position 217 of wild-type human Neu2 is substituted by alanine (L217A) or valine (L217V); (x) the threonine residue at a position corresponding to position 249 of wild-type human Neu2 is substituted by alanine (T249A); (y) the aspartic acid residue at a position corresponding to position 251 of wild-type human Neu2 is substituted by glycine (D251G); (z) the glutamic acid residue at a position corresponding to position 225 of wild-type human Neu2 is substituted by proline (E225P); (aa) the histidine residue at a position corresponding to position 239 of wild-type human Neu2 is substituted by proline (H239P); (bb) the leucine residue at a position corresponding to position 240 of wild-type human Neu2 is substituted by aspartic acid (L240D), asparagine (L240N), or tyrosine (L240Y); (cc) the arginine residue at a position corresponding to position 241 of wild-type human Neu2 is substituted by alanine (R241A), aspartic acid (R241D), leucine (R241L), glutamine (R241Q). or tyrosine (R241Y); (dd) the alanine residue at a position corresponding to position 242 of wild-type human Neu2 is substituted by cysteine (A242C), phenylalanine (A242F), glycine (A242G), histidine (A242H), isoleucine (A2421), lysine (A242K), leucine (A242L), methionine (A242M), asparagine (A242N), glutamine (A242Q), arginine (A242R), serine (A242S), valine (A242V), tryptophan (A242W), or tyrosine (A242Y); (ee) the valine residue at a position corresponding to position 244 of wild-type human Neu2 is substituted by isoleucine (V244I), lysine (V244K), or proline (V244P); (ff) the glutamic acid residue at a position corresponding to position 257 of wild-type human Neu2 is substituted by proline (E257P); (gg) the serine residue at a position corresponding to position 258 is substituted by cysteine (S258C); (hh) the leucine residue at a position corresponding to position 260 of wild-type human Neu2 is substituted by aspartic acid (L260D), phenylalanine (L260F), glutamine (L260Q), or threonine (L260T); (ii) the valine residue at a position corresponding to position 265 of wild-type human Neu2 is substituted by phenylalanine (V265F); (jj) the glutamine residue at a position corresponding to position 270 of wild-type human Neu2 is substituted by alanine (Q270A), histidine (Q270H), phenylalanine (Q270F), proline (Q270P), serine (Q270S), or threonine (Q270T); (kk) the tryptophan residue at a position corresponding to position 292 of wild-type human Neu2 is substituted by arginine (W292R); (ll) the serine residue at a position corresponding to position 301 of wild-type human Neu2 is substituted by alanine (S301A), aspartic acid (S301D), glutamic acid (S301E), phenylalanine (S301F), glycine (S301G), histidine (S301H), isoleucine (S301I), lysine (S301K), leucine (S301L), methionine (S301M), asparagine (S301N), proline (S301P), glutamine (S301Q), arginine (S301R), threonine (S301T), valine (S301V), tryptophan (S301W), or tyrosine (S301Y); (mm) the tryptophan residue at a position corresponding to position 302 of wild-type human Neu2 is substituted by alanine (W302A), aspartic acid (W302D), glutamic acid (W302E), phenylalanine (W302F), glycine (W302G), histidine (W302H), isoleucine (W302I), lysine (W302K), leucine (W302L), methionine (W302M), asparagine (W302N), proline (W302P), glutamine (W302Q), arginine (W302R), serine (W302S), threonine (W302T), valine (W302V), or tyrosine (W302Y); (nn) the valine residue at a position corresponding to position 363 of wild-type human Neu2 is substituted by arginine (V363R); or (oo) the leucine residue at a position corresponding to position 365 of wild-type human Neu2 is substituted by glutamine (L365Q), histidine (L365H), isoleucine (L365I), lysine (L365K) or serine (L365S); or the sialidase comprises a combination of any of the foregoing substitutions. For example, the sialidase may comprise a substitution selected from K9D, P62G, P62N, P62S, P62T, D8OP, A93E, Q126H, Q126Y, R189P, H239P, A242T, Q270A, Q270S, Q270T, S301A, S301R, W302K, W302R, V363R, or L365I, or a combination of any of the foregoing substitutions.

[0117] In certain embodiments, the recombinant mutant human sialidase comprises a deletion of a leucine residue at a position corresponding to position 184 of wild-type human Neu2 (AL184), a deletion of a histidine residue at a position corresponding to position 185 of wild-type human Neu2 (AH185), a deletion of a proline residue at a position corresponding to position 186 of wild-type human Neu2 (AP186), a deletion of an isoleucine residue at a position corresponding to position 187 of wild-type human Neu2 (41187), and a deletion of a glutamine residue at a position corresponding to position 184 of wild-type human Neu2 (AQ188), or a combination of any of the foregoing deletions.

[0118] In certain embodiments, the recombinant mutant human sialidase comprises an insertion between a threonine residue at a position corresponding to position 216 of wild-type human Neu2 and a leucine residue at a position corresponding to position 217 of wild-type human Neu2, for example, an insertion of an amino acid selected from S, T, Y, L, F, A, P, V, I, N, D, and H.

[0119] Additional exemplary sialidase mutations, and combinations of sialidase mutations, are described in International (PCT) Patent Application No. PCT/US2019/012207, filed Jan. 3, 2019, including in the Detailed Description in the section entitled “I. Recombinant Human Sialidases,” and in the Examples in Examples 1, 2, 3, 4, 5, and 6.

[0120] f. Combinations of Substitutions

[0121] The invention further provides a recombinant mutant human sialidase comprising a combination of any of the mutations contemplated herein. For example, the recombinant mutant sialidase enzyme may comprise a combination of 2, 3, 4, 5, 6, 7, 8, 9, 10, 11, 12, 13, 14, 15 or more of the mutations contemplated herein. It is contemplated that the recombinant mutant sialidase enzyme may comprise 1-15, 1-10, 1-7, 1-6, 1-5, 1-4, 1-3, 1-2, 2-15, 2-10, 2-7, 2-6, 2-5, 2-4, 2-3, 3-15, 3-10, 3-7, 3-6, 3-5, or 3-4 of the mutations contemplated herein.

[0122] For example, the recombinant mutant sialidase enzyme may comprise a M1 deletion (ΔM1), M1A substitution, M1D substitution, V6Y substitution, K9D substitution, P62G substitution, P62N substitution, P62S substitution, P62T substitution, A93E substitution, I187K substitution, Q270A substitution, S301R substitution, W302K substitution, C332A substitution, V363R substitution, L365I substitution, or a combination of any of the foregoing.

[0123] In certain embodiments, the recombinant mutant sialidase enzyme comprises a M1 deletion (ΔM1), M1A substitution, M1D substitution, V6Y substitution, I187K substitution, C332A substitution, or a combination of any of the foregoing. For example, the recombinant mutant sialidase enzyme may comprise a combination of mutations selected from: M1A and V6Y; M1A and I187K; M1A and C332A; M1D and V6Y; M1D and I187K; M1D and C332A; ΔM1 and V6Y; ΔM1 and I187K; ΔM1 and C332A; V6Y and I187K; V6Y and C332A; I187K and C332A; M1A, V6Y, and I187K; M1A, V6Y, and C332A; M1A, I187K, and C332A; M1D, V6Y, and I187K; M1D, V6Y, and C332A; M1D, I187K, and C332A; ΔM1, V6Y, and I187K; ΔM1, V6Y, and C332A; ΔM1, I187K, and C332A; V6Y, I187K, and C332A; M1A, V6Y, I187K, and C332A; M1D, V6Y, I187K, and C332A; and ΔM1, V6Y, I187K, and C332A.

[0124] In certain embodiments, the recombinant mutant sialidase enzyme comprises (i) an amino acid substitution identified in TABLE 7, or a combination of any amino acid substitutions identified in TABLE 7, and (ii) an M1 deletion (ΔM1), M1A substitution, M1D substitution, V6Y substitution, I187K substitution, C332A substitution, or a combination of any of the foregoing. For example, the recombinant mutant sialidase enzyme may comprise (i) an amino acid substitution identified in TABLE 7, or a combination of any amino acid substitutions identified in TABLE 7, and (ii) a combination of mutations selected from: M1A and V6Y; M1A and I187K; M1A and C332A; M1D and V6Y; M1D and I187K; M1D and C332A; ΔM1 and V6Y; ΔM1 and I187K; ΔM1 and C332A; V6Y and I187K; V6Y and C332A; I187K and C332A; M1A, V6Y, and I187K; M1A, V6Y, and C332A; M1A, I187K, and C332A; M1D, V6Y, and I187K; M1D, V6Y, and C332A; M1D, I187K, and C332A; ΔM1, V6Y, and I187K; ΔM1, V6Y, and C332A; ΔM1, I187K, and C332A; V6Y, I187K, and C332A; M1A, V6Y, I187K, and C332A; M1D, V6Y, I187K, and C332A; and ΔM1, V6Y, I187K, and C332A.

[0125] In certain embodiments, the recombinant mutant sialidase enzyme comprises: (a) the M1D, V6Y, P62G, A93E, I187K, and C332A substitutions; (b) the M1D, V6Y, K9D, A93E, I187K, C332A, V363R, and L365I substitutions; (c) the M1D, V6Y, P62N, I187K, and C332A substitutions; (d) the M1D, V6Y, I187K, Q270A, S301R, W302K, and C332A substitutions; (e) the M1D, V6Y, P62S, I187K, Q270A, S301R, W302K, and C332A substitutions; (f) the M1D, V6Y, P62T, I187K, Q270A, S301R, W302K, and C332A substitutions; (g) the M1D, V6Y, P62N, I187K, Q270A, S301R, W302K, and C332A substitutions; (h) the M1D, V6Y, P62G, A93E, I187K, S301A, W302R, and C332A substitutions; (i) the M1D, V6Y, P62G, A93E, Q126Y, I187K, Q270T, and C332A substitutions; (j) the M1D, V6Y, P62G, A93E, Q126Y, I187K, and C332A substitutions; or (k) the M1D, V6Y, P62G, A93E, Q126Y, I187K, A242F, Q270T, and C332A substitutions.

[0126] In certain embodiments, the recombinant mutant human sialidase comprises a substitution of a serine residue at a position corresponding to position 301 of wild-type human Neu2 (S301) in combination with a substitution of a tryptophan residue at a position corresponding to position 302 of wild-type human Neu2 (W302). For example, the recombinant mutant human sialidase may comprise a combination of substitutions corresponding to a combination of substitutions listed in a row of TABLE 8 (amino acid positions corresponding to wild-type human Neu2 (SEQ ID NO: 1)). For example, the recombinant mutant human sialidase may comprise: the S301K and W302R substitutions; the S301K and W302K substitutions; or the S301A and W302S substitutions.

TABLE 8
Substitutions
S301A, W302R
S301A, W302S
S301A, W302T
S301K, W302S
S301N, W302S
S301T, W302S
S301T, W302T
S301T, W302R
S301A, W302A
S301K, W302R
S301K, W302T
S301N, W302T
S301K, W302K
S301P, W302R
S301P, W302S
S301P, W302T

[0127] In certain embodiments, the recombinant mutant human sialidase comprises a combination of substitutions corresponding to a combination of substitutions listed in a row of TABLE 9 (amino acid positions corresponding to wild-type human Neu2 (SEQ ID NO: 1)).

TABLE 9
Substitutions
M1D, V6Y, P62G, I187K, C332A
M1D, V6Y, K9D, I187K, C332A, V363R, L365I
M1D, V6Y, P62G, A93E, I187K, C332A
M1D, V6Y, K9D, I187K, C332A, V363R, L365K
M1D, V6Y, K9D, I187K, C332A, V363R, L365S
M1D, V6Y, K9D, I187K, C332A, V363R, L365Q
M1D, V6Y, K9D, I187K, C332A, V363R, L365H
M1D, V6Y, A93K, I187K, C332A
M1D, V6Y, A93E, I187K, C332A
V6Y, I187K, W292R
V6Y, G107D, I187K
V6Y, C125L
C125L, I187K
V6Y, C125L, I187K
M1D, V6Y, K45A, I187K, C332A
M1D, V6Y, Q270A, I187K, C332A
M1D, V6Y, K44R, K45R, I187K, C332A
M1D, V6Y, Q112R, I187K, C332A
M1D, V6Y, Q270F, I187K, C332A
M1D, V6Y, I187K, S301R, W302K, C332A
M1D, V6Y, K44E, K45E, I187K, C332A
M1D, V6Y, I187K, L217V, C332A
M1D, V6Y, I187K, L217A, C332A
M1D, V6Y, K44E, K45E, I187K, S301R, W302K, C332A
M1D, V6Y, Q112R, I187K, S301R, W302K, C332A
M1D, V6Y, I187K, Q270A, S301R, W302K, C332A
M1D, V6Y, K44E, K45E, Q112R, I187K, C332A
M1D, V6Y, K44E, K45E, I187K, Q270A, C332A
M1D, V6Y, K45A, I187K, Q270A, C332A
M1D, V6Y, I187K, Q270H, C332A
M1D, V6Y, I187K, Q270P, C332A
M1D, V6Y, Q112K, I187K, C332A
M1D, V6Y, P62S, I187K, Q270A, S301R, W302K, C332A
M1D, V6Y, P62T, I187K, Q270A, S301R, W302K, C332A
M1D, V6Y, P62N, I187K, Q270A, S301R, W302K, C332A
V6Y, P62H, I187K
V6Y, Q108H, I187K
M1D, V6Y, P62H, I187K, C332A
M1D, V6Y, P62G, I187K, C332A
V6Y, P62G, I187K
M1D, V6Y, P62H, I187K
M1D, V6Y, Q108H, I187K
M1D, V6Y, P62N, I187K, C332A
M1D, V6Y, P62D, I187K, C332A
M1D, V6Y, P62E, I187K, C332A
V6Y, C164G, I187K, T249A
V6Y, C164G, I187K
V6Y, Q126L, I187K D251G
V6Y, L54M, Q69H, R78K, A171G, I187K
V6Y, P62T, I187K
V6Y, Al 50V, I187K
P5H, V6Y, P62S, I187K
V6Y, C164G, I187K
Q126Y, Q170T
Q126Y, A242F, Q270T
M1D, V6Y, P62G, A93E, Q126E, I187K, C332A
M1D, V6Y, P62G, A93E, Q126I, I187K, C332A
M1D, V6Y, P62G, A93E, Q126L, I187K, C332A
M1D, V6Y, P62G, A93E, Q126Y, I187K, C332A
M1D, V6Y, P62G, A93E, Q126F, I187K, C332A
M1D, V6Y, P62G, A93E, Q126H, I187K, C332A
M1D, V6Y, P62G, A93E, I187K, Q270S, C332A
M1D, V6Y, P62G, A93E, I187K, Q270T, C332A
M1D, V6Y, P62G, A93E, Q126Y, I187K, Q270T, C332A
M1D, V6Y, P62G, A93E, Q126Y, I187K, A242F, Q270T, C332A
M1D, V6Y, P62G, D80P, A93E, I187K, C332A
M1D, V6Y, P62G, A93E, R170P, I187K, C332A
M1D, V6Y, P62G, A93E, I187K, Q188P, C332A
M1D, V6Y, P62G, A93E, I187K, R189P, C332A
M1D, V6Y, P62G, A93E, I187K, E225P, C332A
M1D, V6Y, P62G, A93E, I187K, H239P, C332A
M1D, V6Y, P62G, A93E, I187K, E257P, C332A
M1D, V6Y, P62G, A93E, I187K, S301A, C332A
M1D, V6Y, P62G, A93E, I187K, S301D, C332A
M1D, V6Y, P62G, A93E, I187K, S301E, C332A
M1D, V6Y, P62G, A93E, I187K, S301F, C332A
M1D, V6Y, P62G, A93E, I187K, S301H, C332A
M1D, V6Y, P62G, A93E, I187K, S301K, C332A
M1D, V6Y, P62G, A93E, I187K, S301L, C332A
M1D, V6Y, P62G, A93E, I187K, S301M, C332A
M1D, V6Y, P62G, A93E, I187K, S301N, C332A
M1D, V6Y, P62G, A93E, I187K, S301P, C332A
M1D, V6Y, P62G, A93E, I187K, S301Q, C332A
M1D, V6Y, P62G, A93E, I187K, S301R, C332A
M1D, V6Y, P62G, A93E, I187K, S301T, C332A
M1D, V6Y, P62G, A93E, I187K, S301V, C332A
M1D, V6Y, P62G, A93E, I187K, S301W, C332A
M1D, V6Y, P62G, A93E, I187K, S301Y, C332A
M1D, V6Y, P62G, A93E, I187K, W302A, C332A
M1D, V6Y, P62G, A93E, I187K, W302D, C332A
M1D, V6Y, P62G, A93E, I187K, W302F, C332A
M1D, V6Y, P62G, A93E, I187K, W302G, C332A
M1D, V6Y, P62G, A93E, I187K, W302H, C332A
M1D, V6Y, P62G, A93E, I187K, W302I, C332A
M1D, V6Y, P62G, A93E, I187K, W302L, C332A
M1D, V6Y, P62G, A93E, I187K, W302M, C332A
M1D, V6Y, P62G, A93E, I187K, W302N, C332A
M1D, V6Y, P62G, A93E, I187K, W302P, C332A
M1D, V6Y, P62G, A93E, I187K, W302Q, C332A
M1D, V6Y, P62G, A93E, I187K, W302R, C332A
M1D, V6Y, P62G, A93E, I187K, W302S, C332A
M1D, V6Y, P62G, A93E, I187K, W302T, C332A
M1D, V6Y, P62G, A93E, I187K, W302V, C332A
M1D, V6Y, P62G, A93E, I187K, W302Y, C332A
M1D, V6Y, P62G, A93E, I187K, S301A, W302A, C332A
M1D, V6Y, P62G, A93E, I187K, S301A, W302R, C332A
M1D, V6Y, P62G, A93E, I187K, S301A, W302S, C332A
M1D, V6Y, P62G, A93E, I187K, S301A, W302T, C332A
M1D, V6Y, P62G, A93E, I187K, S301K, W302S, C332A
M1D, V6Y, P62G, A93E, I187K, S301K, W302R, C332A
M1D, V6Y, P62G, A93E, I187K, S301K, W302T, C332A
M1D, V6Y, P62G, A93E, I187K, S301N, W302S, C332A
M1D, V6Y, P62G, A93E, I187K, S301N, W302T, C332A
M1D, V6Y, P62G, A93E, I187K, S301T, W302R, C332A
Q126Y, Q270T
Q126Y, A242F, Q270T

[0128] In certain embodiments, the recombinant mutant human sialidase comprises the amino acid sequence of any one of SEQ ID NOs: 48-54, 149, 154, 159, or 191, or an amino acid sequence that has at least 85%, 90%, 95%, 96%, 97%, 98%, or 99% sequence identity to any one of SEQ ID NOs: 48-54, 149, 154, 159, or 191.

[0129] In certain embodiments, the recombinant mutant human sialidase comprises the amino acid sequence of

(SEQ ID NO: 47)
X₁X₂SX₃X₄X₅LQX₆ESVFQSGAHAYRIPALLYLPGQQSLLAFAEQRASX₇
X₈DEHAELIVX₉RRGDYDAX₁₀THQVQWX₁₁AQEVVAQAX₁₂LDGHRSMNPC
PLYDX₁₃QTGTLFLFFIAIPX₁₄X₁₅VTEX₁₆QQLQTRANVTRLX₁₇X₁₈VTS
TDHGRTWSSPRDLTDAAIGPX₁₉YREWSTFAVGPGHX₂₀LQLHDRX₂₁RSL
VVPAYAYRKLHPX₂₂QRPIPSAFX₂₃FLSHDHGRTWARGHFVAQDTX₂₄EC
QVAEVETGEQRVVTLNARSHLRARVOAQSX₂₅NX₂₆GLDFQX₂₇SQLVKKL
VEPPPX₂₈GX₂₉QGSVISFPSPRSGPGSPAQX₃₀LLYTHPTHX₃₁X₃₂QRADL
GAYLNPRPPAPEAWSEPX₃₃LLAKGSX₃₄AYSDLQSMGTGPDGSPLFGX₃₅
LYEANDYEEIX₃₆FX₃₇MFTLKQAFPAEYLPQ,

wherein X₁ is Ala, Arg, Asn, Asp, Gln, Glu, Gly, His, Leu, Lys, Met, Phe, Thr, Val, or not present, X₂ is Ala or Lys, X₃ is Asn or Leu, X₄ is Pro or His, X₅ is Phe, Trp, Tyr or Val, X₆ is Lys or Asp, X₇ is Lys, Arg, or Glu. X₈ is Lys, Ala, Arg, or Glu, X₉ is Leu or Met, X₁₀ is Pro, Asn, Asp, His, Glu, Gly, Ser or Thr, X₁₁ is Gln or His, X₁₂ is Arg or Lys, X₁₃ is Ala, Glu or Lys, X₁₄ is Gly or Asp, X₁₅ is Gln or His, X₁₆ is Gln, Arg, or Lys, X₁₇ is Ala, Cys, Ile, Ser, Val, or Leu, X₁₈ is Gln or Leu, X₁₉ is Ala or Val, X₂₀ is Cys or Gly, X₂₁ is Ala or Gly, X₂₂ is Arg, Ile, or Lys, X₂₃ is Ala, Cys, Leu, or Val, X₂₄ is Leu, Ala, or Val, X₂₅ is Thr or Ala, X₂₆ is Asp or Gly, X₂₇ is Glu or Lys, X₂₈ is Gln, Ala, His, Phe, or Pro, X₂₉ is Cys or Val, X₃₀ is Trp or Arg, X₃₁ is Ser or Arg, X₃₂ is Trp or Lys, X₃₃ is Lys or Val, X₃₄ is Ala, Cys, Ser, or Val, X₃₅ is Cys, Leu, or Val, X₃₆ is Val or Arg, and X₃₇ is Leu, Gln, His, Ile, Lys, or Ser, and the sialidase comprises at least one mutation relative to wild-type human Neu2 (SEQ ID NO: 1).

[0130] In certain embodiments, the recombinant mutant human sialidase comprises the amino acid sequence of

(SEQ ID NO: 46)
X₁ASLPX₂LQX₃ESVFQSGAHAYRIPALLYLPGQQSLLAFAEQRASKKDE
HAELIVLRRGDYDAX4THQVQWQAQEVVAQARLDGHRSMNPCPLYDX₅Q
TGTLFLFFIAIPGQVTEQQQLQTRANVTRLCQVTSTDHGRTWSSPRDLT
DAAIGPAYREWSTFAVGPGHCLQLHDRARSLVVPAYAYRKLHPX₆QRPIP
SAFCFLSHDHGRTWARGHFVAQDTLECQVAEVETGEQRWTLNARSHLRA
RVQAQSTNDGLDFQESQLVKKLVEPPPX₇GCQGSVISFPSPRSGPGSPA
QWLLYTHPTHX₈X₉QRADLGAYLNPRPPAPEAWSEPVLLAKGSX₁₀AYSD
LQSMGTGPDGSPLFGCLYEANDYEEIX₁₁FX₁₂MFTLKQAFPAEYLPQ,

[0131] wherein X₁ is Ala, Arg, Asn, Asp, Gln, Glu, Gly, His, Leu, Lys, Met, Phe, Thr, Val, or not present, X₂ is Phe, Trp, Tyr or Val, X₃ is Lys or Asp, X₄ is Pro, Asn, Asp, His, Glu, Gly, Ser or Thr, X₅ is Ala, Glu, or Lys, X₆ is Arg, Ile, or Lys, X₇ is Gln, Ala, His, Phe, or Pro, X₈ is Ser or Arg, X₉ is Trp or Lys, X₁₀ is Ala, Cys, Ser, or Val, X₁₁ is Val or Arg, and X₁₂ is Leu, Gln, His, Ile, Lys, or Ser, and the sialidase comprises at least one mutation relative to wild-type human Neu2 (SEQ ID NO: 1). In certain embodiments, X₁ is Ala, Asp, Met, or not present, X₂ is Tyr or Val, X₃ is Lys or Asp, X₄ is Pro, Asn, Gly, Ser or Thr, X₅ is Ala or Glu, X₆ is Ile or Lys, X₇ is Gln or Ala, X₈ is Ser or Arg, X₉ is Trp or Lys, X₁₀ is Ala or Cys, X₁₁ is Val or Arg, and X₁₂ is Leu or Ile.

[0132] In certain embodiments, the recombinant mutant human sialidase comprises the amino acid sequence of

(SEQ ID NO: 182)
X₁X₂SX₃X₄X₅LQX₆ESVFQSGAHAYRIPALLYLPGQQSLLAFAEQRASX₇
X₈DEHAELIVX₉RRGDYDAX₁₀THQVQWX₁₁AQEVVAQAX₁₂LX₁₃GHRSMN
PCPLYDX₁₄QTGTLFLFFIAIPX₁₅X₁₆VTEX₁₇QQLQTRANVTRLX₁₈X₁₉V
TSTDHGRTWSSPRDLTDAAIGPX₂₀YREWSTFAVGPGHX₂₁LQLHDX₂₂X₂₃
RSLVVPAYAYRKLHPX₂₄X₂₅X₂₆PIPSAFX₂₇FLSHDHGRTWARGHFVX₂₈
QDTX₂₉ECQVAEVX₃₀TGEQRVVTLNARSX₃₁X₃₂X₃₃X₃₄RX₃₅QAQSX₃₆NX₃₇
GLDFQX₃₈X₃₉QX₄₀VKKLX₄₁EPPPX₄₂GX₄₃QGSVISFPSPRSGPGSPAQ
X₄₄LLYTHPTHX₄₅X₄₆QRADLGAYLNPRPPAPEAWSEPX₄₇LLAKGSX₄₈A
YSDLQSMGTGPDGSPLFGX₄₉LYEANDYEEIX₅₀FX₅₁MFTLKQAFPAEYL
PQ,

wherein X₁ is Ala, Arg, Asn, Asp, Gln, Glu, Gly, His, Leu, Lys, Met, Phe, Thr, Val, or not present, X₂ is Ala or Lys, X₃ is Asn or Leu, X₄ is Pro or His, X₅ is Phe, Trp, Tyr or Val, X₆ is Lys or Asp, X₇ is Lys, Arg, or Glu, X₈ is Lys, Ala, Arg, or Glu, X₉ is Leu or Met, X₁₀ is Pro, Asn, Asp, His, Glu, Gly, Ser or Thr, X₁₁ is Gln or His, X₁₂ is Arg or Lys, X₁₃ is Asp or Pro, X₁₄ is Ala, Glu or Lys, X₁₅ is Gly or Asp, X₁₆ is Gln or His, X₁₇ is Gln, Arg, or Lys, X₁₈ is Ala, Cys, Ile, Ser, Val, or Leu, X₁₉ is Gln, Leu, Glu, Phe, His, Ile, Leu, or Tyr, X₂₀ is Ala or Val, X₂₁ is Cys or Gly, X₂₂ is Arg or Pro, X₂₃ is Ala or Gly, X₂₄ is Arg, Ile, or Lys, X₂₅ is Gln or Pro, X₂₆ is Arg or Pro, X₂₇ is Ala, Cys, Leu, or Val, X₂₈ is Ala, Cys, Asn, Ser, or Thr, X₂₉ is Leu, Ala, or Val, Xao is Glu or Pro, X₃₁ is His or Pro, X₃₂ is Leu, Asp, Asn, or Tyr, X₃₃ is Arg, Ala, Asp, Leu, Gln, or Tyr, X₃₄ is Ala, Cys, Phe, Gly, His, Ile, Lys, Leu, Met, Asn, Gln, Arg, Ser, Val, Trp, or Tyr, X₃₅ is Val, Ile, or Lys, X₃₆ is Thr or Ala, X₃₇ is Asp or Gly, X₃₈ is Glu, Lys, or Pro, X₃₉ is Ser or Cys, X₄₀ is Leu, Asp, Phe, Gln, or Thr, X₄₁ is Val or Phe, X₄₂ is Gln, Ala, His, Phe, Pro, Ser, or Thr, X₄₃ is Cys or Val, X₄₄ is Trp or Arg, X₄₅ is Ser, Arg, Ala, Asp, Glu, Phe, Gly, His, Ile, Lys, Leu, Met, Asn, Pro, Gln, Thr, Val, Trp, or Tyr, X₄₆ is Trp, Lys, Ala, Asp, Glu, Phe, Gly, His, Ile, Lys, Leu, Met, Asn, Pro, Gln, Arg, Ser, Thr, Val, or Tyr, X₄₇ is Lys or Val, X₄₈ is Ala, Cys, Ser, or Val, X₄₉ is Cys, Leu, or Val, X₅₀ is Val or Arg, and X₅₁ is Leu, Gln, His, Ile, Lys, or Ser, and the sialidase comprises at least one mutation relative to wild-type human Neu2 (SEQ ID NO: 1).

[0133] In certain embodiments, the recombinant mutant human sialidase comprises the amino acid sequence of

(SEQ ID NO: 183)
X₁ASLPX₂LQX₃ESVFQSGAHAYRIPALLYLPGQQSLLAFAEQRASKKDE
HAELIVLRRGDYDAX₄THQVQWQAQEVVAQARLDGHRSMNPCPLYDX₅QT
GTLFLFFIAIPGQVTEQQQLQTRANVTRLCX₆VTSTDHGRTWSSPRDLTD
AAIGPAYREWSTFAVGPGHCLQLHDRARSLVVPAYAYRKLHPX₇QRPIPS
AFCFLSHDHGRTWARGHFVAQDTLECQVAEVETGEQRVVTLNARSHLRX₈
RVQAQSTNDGLDFQESQLVKKLVEPPPX₉GCQGSVISFPSPRSGPGSPAQ
WLLYTHPTHX₁₀X₁₁QRADLGAYLNPRPPAPEAWSEPVLLAKGSX₁₂AYSDL
QSMGTGPDGSPLFGCLYEANDYEEIX₁₃FX₁₄MFTLKOAFPAEYLPQ,

wherein X₁ is Ala, Arg, Asn, Asp, Gln, Glu, Gly, His, Leu, Lys, Met, Phe, Thr, Val, or not present, X₂ is Phe, Trp, Tyr or Val, X₃ is Lys or Asp, X₄ is Pro, Asn, Asp, His, Glu, Gly, Ser or Thr, X₅ is Ala, Glu, or Lys, X₆ is Gln, Leu, Glu, Phe, His, Ile, Leu, or Tyr, X₇ is Arg, Ile, or Lys, X₈ is Ala, Cys, Phe, Gly, His, Ile, Lys, Leu, Met, Asn, Gln, Arg, Ser, Val, Trp, or Tyr, X₉ is Gln, Ala, His, Phe, Pro, Ser, or Thr, X₁₀ is Ser, Arg, Ala, Asp, Glu, Phe, Gly, His, Ile, Lys, Leu, Met, Asn, Pro, Gln, Thr, Val, Trp, or Tyr, X₁₁ is Trp, Lys, Ala, Asp, Glu, Phe, Gly, His, Ile, Lys, Leu, Met, Asn, Pro, Gln, Arg, Ser, Thr, Val, or Tyr, X₁₂ is Ala, Cys, Ser, or Val, X₁₃ is Val or Arg, and X₁₄ is Leu, Gln, His, Ile, Lys, or Ser, and the sialidase comprises at least one mutation relative to wild-type human Neu2 (SEQ ID NO: 1). In certain embodiments, X₁ is Ala, Asp, Met, or not present, X₂ is Tyr or Val, X₃ is Lys or Asp, X₄ is Pro, Asn, Gly, Ser or Thr, X₅ is Ala or Glu, X₆ is Gln or Tyr, X₇ is Ile or Lys, X₈ is Ala or Thr, X₉ is Gln, Ala, or Thr, X₁₀ is Ser, Arg, or Ala, X₁₁ is Trp, Lys, or Arg, X₁₂ is Ala or Cys, X₁₃ is Val or Arg, and X₁₄ is Leu or Ile.

[0134] In certain embodiments, the recombinant mutant human sialidase comprises a conservative substitution relative to a recombinant mutant human sialidase sequence disclosed herein. As used herein, the term “conservative substitution” refers to a substitution with a structurally similar amino acid. For example, conservative substitutions may include those within the following groups: Ser and Cys; Leu, Ile, and Val; Glu and Asp; Lys and Arg; Phe, Tyr, and Trp; and Gln, Asn, Glu, Asp, and His. Conservative substitutions may also be defined by the BLAST (Basic Local Alignment Search Tool) algorithm, the BLOSUM substitution matrix (e.g., BLOSUM 62 matrix), or the PAM substitution:p matrix (e.g., the PAM 250 matrix).

[0135] Sequence identity may be determined in various ways that are within the skill of a person skilled in the art, e.g., using publicly available computer software such as BLAST, BLAST-2, ALIGN or Megalign (DNASTAR) software. BLAST (Basic Local Alignment Search Tool) analysis using the algorithm employed by the programs blastp, blastn, blastx, tblastn and tblastx (Karlin et al., (1990) PROC. NATL. ACAD. SCI. USA 87:2264-2268; Altschul, (1993) J. MOL. EVOL. 36:290-300; Altschul et al., (1997) NUCLEIC ACIDS RES. 25:3389-3402, incorporated by reference herein) are tailored for sequence similarity searching. For a discussion of basic issues in searching sequence databases see Altschul et al., (1994) NATURE GENETICS 6:119-129, which is fully incorporated by reference herein. Those skilled in the art can determine appropriate parameters for measuring alignment, including any algorithms needed to achieve maximal alignment over the full length of the sequences being compared. The search parameters for histogram, descriptions, alignments, expect (i.e., the statistical significance threshold for reporting matches against database sequences), cutoff, matrix and filter are at the default settings. The default scoring matrix used by blastp, blastx, tblastn, and tblastx is the BLOSUM62 matrix (Henikoff et al., (1992) PROC. NATL. ACAD. SCI. USA 89:10915-10919, fully incorporated by reference herein). Four blastn parameters may be adjusted as follows: Q=10 (gap creation penalty); R=10 (gap extension penalty); wink=1 (generates word hits at every wink.sup.th position along the query); and gapw=16 (sets the window width within which gapped alignments are generated). The equivalent blastp parameter settings may be Q=9; R=2; wink=1; and gapw=32. Searches may also be conducted using the NCBI (National Center for Biotechnology Information) BLAST Advanced Option parameter (e.g.: -G, Cost to open gap [Integer]: default=5 for nucleotides/ 11 for proteins; -E, Cost to extend gap [Integer]: default =2 for nucleotides/ 1 for proteins; -q, Penalty for nucleotide mismatch [Integer]: default =−3; -r, reward for nucleotide match [Integer]: default=1; -e, expect value [Real]: default=10; -W, wordsize [Integer]: default=11 for nucleotides/ 28 for megablast/ 3 for proteins; -y, Dropoff (X) for blast extensions in bits: default=20 for blastn/ 7 for others; -X, X dropoff value for gapped alignment (in bits): default=15 for all programs, not applicable to blastn; and —Z, final X dropoff value for gapped alignment (in bits): 50 for blastn, 25 for others). ClustalW for pairwise protein alignments may also be used (default parameters may include, e.g., Blosum62 matrix and Gap Opening Penalty=10 and Gap Extension Penalty=0.1). A Bestfit comparison between sequences, available in the GCG package version 10.0, uses DNA parameters GAP=50 (gap creation penalty) and LEN=3 (gap extension penalty). The equivalent settings in Bestfit protein comparisons are GAP=8 and LEN=2.

[0136] II. Fusion Proteins/Antibody Conjugates

[0137] To promote the selective removal of sialic acids on hypersialylated cancer cells and/or in the tumor microenvironment, it may be helpful to target a sialidase as described herein to such a cell or to such a tumor microenvironment. Additionally, in order to promote the removal of sialic acid by a sialidase in a subject, it may be helpful to extend the plasma half-life of the sialidase in the subject. These can be achieved by including the sialidase in a fusion protein and/or antibody conjugate (e.g., a chemically conjugated conjugate).

[0138] Accordingly, the invention further provides fusion proteins comprising a sialidase enzyme, or a functional fragment thereof, and a portion or fragment of an antibody, such as an immunoglobulin Fc domain (also referred to herein as an Fc domain), or an immunoglobulin antigen-binding domain (also referred to herein as an antigen-binding domain). In certain embodiments, the sialidase and antibody or portion thereof (e.g., immunoglobulin Fc domain or antigen-binding domain) are linked by a peptide bond or an amino acid linker.

[0139] As used herein, unless otherwise indicated, the term “fusion protein” is understood to refer to a single polypeptide chain comprising amino acid sequences based upon two or more separate proteins or polypeptide chains, where the two amino acid sequences may be fused together directly or via an intervening linker sequence, e.g., via an intervening amino acid linker. A nucleotide sequence encoding a fusion protein can, for example, be created using conventional recombinant DNA technologies.

[0140] In certain embodiments, the fusion protein comprises a tag, such as a Strep tag (e.g., a Strep II tag), a His tag (e.g., a 10x His tag), a myc tag, or a FLAG tag. The tag can be located on the C-terminus or the N-terminus of the fusion protein. In certain embodiments, a fusion protein comprises a sialidase portion joined to a polypeptide comprising an immunoglobulin heavy chain in an N- to C-terminal orientation, wherein the sialidase portion comprises an N-terminal addition of MEDLRP (SEQ ID NO: 4), and a Strep II Tag is located on the C-terminus of the immunoglobulin heavy chain or the N-terminus of the sialidase portion.

[0141] a. Sialidase portion

[0142] The sialidase portion of the fusion protein described herein can be any sialidase, e.g., a fungal, bacterial, non-human mammalian or human sialidase. In certain embodiments, the sialidase portion is a recombinant human sialidase comprising at least one mutation relative to a wild-type human sialidase, e.g., a substitution, deletion, or addition of at least one amino acid, as described above.

[0143] In certain embodiments, the sialidase is any recombinant mutant human sialidase disclosed herein, or a functional fragment thereof.

[0144] In certain embodiments, the sialidase portion comprises a C332A and C352L mutation. In certain embodiments, the sialidase comprises an N-terminal addition of MEDLRP (SEQ ID NO: 4) or EDLRP (SEQ ID NO: 3). In certain embodiments, the sialidase portion comprises a LSHSLST (SEQ ID NO: 22) peptide on the N-terminus. In certain embodiments, the sialidase portion comprises an N-terminal addition of MEDLRP (SEQ ID NO: 4) and an A2K substitution. In certain embodiments, the sialidase portion comprises an N-terminal addition of MEDLRP (SEQ ID NO: 4) and a C332A substitution.

[0145] In certain embodiments, the sialidase portion comprises an N-terminal addition of MEDLRP (SEQ ID NO: 4), a C332A substitution, and a C352L substitution.

[0146] In certain embodiments, the sialidase portion comprises an M1 deletion (ΔM1), M1A substitution, M1D substitution, V6Y substitution, K9D substitution, P62G substitution, P62N substitution, P62S substitution, P62T substitution, A93E substitution, Q126Y substitution, I187K substitution, A242T substitution, Q270A substitution, Q270T substitution, S301R substitution, S301R substitution, W302K substitution, W302R substitution, C332A substitution, V363R substitution, L365I substitution, or a combination of any of the foregoing.

[0147] In certain embodiments, the sialidase portion comprises the amino acid sequence of any one of SEQ ID NOs: 48-54, 149, 154, 159, or 191, or an amino acid sequence that has at least 85%, 90%, 95%, 96%, 97%, 98%, or 99% sequence identity to any one of SEQ ID NOs: 48-54, 149, 154, 159, or 191.

[0148] b. Antibody Portion

[0149] As used herein, unless otherwise indicated, the term “antibody” is understood to mean an intact antibody (e.g., an intact monoclonal antibody), or a fragment thereof, such as a Fc fragment of an antibody (e.g., an Fc fragment of a monoclonal antibody), or an antigen-binding fragment of an antibody (e.g., an antigen-binding fragment of a monoclonal antibody), including an intact antibody, antigen-binding fragment, or Fc fragment that has been modified, engineered, or chemically conjugated. Examples of antigen-binding fragments include Fab, Fab′, (Fab′)₂, Fv, single chain antibodies (e.g., scFv), minibodies, and diabodies. Examples of antibodies that have been modified or engineered include chimeric antibodies, humanized antibodies, and multispecific antibodies (e.g., bispecific antibodies). An example of a chemically conjugated antibody is an antibody conjugated to a toxin moiety.

[0150] In certain embodiments, the fusion protein comprises an immunoglobulin Fc domain. As used herein, unless otherwise indicated, the term “immunoglobulin Fc domain” refers to a fragment of an immunoglobulin heavy chain constant region which, either alone or in combination with a second immunoglobulin Fc domain, is capable of binding to an Fc receptor. An immunoglobulin Fc domain may include, e.g., immunoglobulin CH₂ and CH₃ domains. An immunoglobulin Fc domain may include, e.g., immunoglobulin CH₂ and CH₃ domains and an immunoglobulin hinge region. Boundaries between immunoglobulin hinge regions, CH_{2,} and CH₃ domains are well known in the art, and can be found, e.g., in the PROSITE database (available on the world wide web at prosite.expasy.org).

[0151] In certain embodiments, the immunoglobulin Fc domain is derived from a human IgG1, IgG2, IgG3, IgG4, IgAl, IgA2, IgD, IgE, and IgM Fc domain. A single amino acid substitution (S228P according to Kabat numbering; designated IgG4Pro) may be introduced to abolish the heterogeneity observed in recombinant IgG4 antibody. See Angal, S. et al. (1993) MOL. IMMUNOL. 30:105-108.

[0152] In certain embodiments, the immunoglobulin Fc domain is derived from a human IgG1 isotype or another isotype that elicits antibody-dependent cell-mediated cytotoxicity (ADCC) and/or complement mediated cytotoxicity (CDC). In certain embodiments, the immunoglobulin Fc domain is derived from a human IgG1 isotype (e.g., SEQ ID NO: 31 or SEQ ID NO: 5).

[0153] In certain embodiments, the immunoglobulin Fc domain is derived from a human IgG4 isotype or another isotype that elicits little or no antibody-dependent cell-mediated cytotoxicity (ADCC) and/or complement mediated cytotoxicity (CDC). In certain embodiments, the immunoglobulin Fc domain is derived from a human IgG4 isotype.

[0154] In certain embodiments, the immunoglobulin Fc domain comprises either a “knob” mutation, e.g., T366Y, or a “hole” mutation, e.g., Y407T, for heterodimerization with a second polypeptide (residue numbers according to EU numbering, Kabat, E. A., et al. (1991) SEQUENCES OF PROTEINS OF IMMUNOLOGICAL INTEREST, FIFTH EDITION, U.S. Department of Health and Human Services, NIH Publication No. 91-3242).

[0155] In certain embodiments, the fusion protein comprises an immunoglobulin antigen-binding domain. The inclusion of such a domain may improve targeting of a fusion protein to a sialylated cancer cell and/or to the tumor microenvironment. As used herein, unless otherwise indicated, the term “immunoglobulin antigen-binding domain” refers to a polypeptide that, alone or in combination with another immunoglobulin antigen-binding domain, defines an antigen-binding site. Exemplary immunoglobulin antigen-binding domains include, for example, immunoglobulin heavy chain variable region and an immunoglobulin light chain variable region, where the variable regions together define an antigen binding site.

[0156] The immunoglobulin antigen-binding domain and/or antigen binding site can be derived from an antibody selected from, for example, adecatumumab, ascrinvacumab, cixutumumab, conatumumab, daratumumab, drozitumab, duligotumab, durvalumab, dusigitumab, enfortumab, enoticumab, epratuxumab, figitumumab, ganitumab, glembatumumab, intetumumab, ipilimumab, iratumumab, icrucumab, lexatumumab, lucatumumab, mapatumumab, narnatumab, necitumumab, nesvacumab, ofatumumab, olaratumab, panitumumab, patritumab, pritumumab, radretumab, ramucirumab, rilotumumab, robatumumab, seribantumab, tarextumab, teprotumumab, tovetumab, vantictumab, vesencumab, votumumab, zalutumumab, flanvotumab, altumomab, anatumomab, arcitumomab, bectumomab, blinatumomab, detumomab, ibritumomab, minretumomab, mitumomab, moxetumomab, naptumomab, nofetumomab, pemtumomab, pintumomab, racotumomab, satumomab, solitomab, taplitumomab, tenatumomab, tositumomab, tremelimumab, abagovomab, atezolizumab, durvalumab, avelumab, igovomab, oregovomab, capromab, edrecolomab, nacolomab, amatuximab, bavituximab, brentuximab, cetuximab, derlotuximab, dinutuximab, ensituximab, futuximab, girentuximab, indatuximab, isatuximab, margetuximab, rituximab, siltuximab, ublituximab, ecromeximab, abituzumab, alemtuzumab, bevacizumab, bivatuzumab, brontictuzumab, cantuzumab, cantuzumab, citatuzumab, clivatuzumab, dacetuzumab, demcizumab, dalotuzumab, denintuzumab, elotuzumab, emactuzumab, emibetuzumab, enoblituzumab, etaracizumab, farletuzumab, ficlatuzumab, gemtuzumab, imgatuzumab, inotuzumab, labetuzumab, lifastuzumab, lintuzumab, lirilumab, lorvotuzumab, lumretuzumab, matuzumab, milatuzumab, moxetumomab, nimotuzumab, obinutuzumab, ocaratuzumab, otlertuzumab, onartuzumab, oportuzumab, parsatuzumab, pertuzumab, pidilizumab, pinatuzumab, polatuzumab, sibrotuzumab, simtuzumab, tacatuzumab, tigatuzumab, trastuzumab, tucotuzumab, urelumab, vandortuzumab, vanucizumab, veltuzumab, vorsetuzumab, sofituzumab, catumaxomab, ertumaxomab, depatuxizumab, ontuxizumab, blontuvetmab, tamtuvetmab, nivolumab, pembrolizumab, epratuzumab, MEDI9447, urelumab, utomilumab, hu3F8, hu14.18-IL-2, 3F8/OKT3BsAb, lirilumab, BMS-986016 pidilizumab, AMP-224, AMP-514, BMS-936559, atezolizumab, and avelumab. In certain embodiments, the immunoglobulin antigen-binding domain can be derived from an antibody selected from trastuzumab, daratumumab, girentuximab, ofatumumab, and rituximab.

[0157] In certain embodiments, the immunoglobulin antigen-binding domain is derived from trastuzumab. The trastuzumab heavy chain amino acid sequence is depicted in SEQ ID NO: 63, and the trastuzumab light chain amino acid sequence is depicted in SEQ ID NO: 64. The amino acid sequence of an exemplary scFv derived from trastuzumab is depicted in SEQ ID NO: 65.

[0158] The immunoglobulin antigen-binding domain and/or antigen binding site can be derived from an antibody that binds a cancer antigen selected from, for example, adenosine A2a receptor (A2aR), A kinase anchor protein 4 (AKAP4), B melanoma antigen (BAGE), brother of the regulator of imprinted sites (BORIS), breakpoint cluster region Abelson tyrosine kinase (BCR/ABL), CA125, CAIX, CD19, CD20, CD22, CD30, CD33, CD52, CD73, CD137, carcinoembryonic antigen (CEA), CS1, cytotoxic T-lymphocyte-associated antigen 4 (CTLA-4), estrogen receptor binding site associated antigen 9 (EBAG9), epidermal growth factor (EGF), epidermal growth factor receptor (EGFR), EGF-like module receptor 2 (EMR2), epithelial cell adhesion molecule (EpCAM) (17-1A), FR-alpha, G antigen (GAGE), disialoganglioside GD2 (GD2), glycoprotein 100 (gp100), human epidermal growth factor receptor 2 (Her2), hepatocyte growth factor (HGF), human papillomavirus 16 (HPV-16), heat-shock protein 105 (HSP105), isocitrate dehydrogenase type 1 (IDH1), idiotype (NeuGcGM3), indoleamine-2,3-dioxygenase 1 (ID01), IGF-1, IGF1R, IGG1K, killer cell immunoglobulin-like receptor (KIR), lymphocyte activation gene 3 (LAG-3), lymphocyte antigen 6 complex K (LY6K), Matrix-metalloproteinase-16 (MMP16), melanotransferrin (MFI2), melanoma antigen 3 (MAGE-A3), melanoma antigen C2 (MAGE-C2), melanoma antigen D4 (MAGE-D4), melanoma antigen recognized by T-cells 1 (Melan-A/MART-1), N-methyl-N′-nitroso-guanidine human osteosarcoma transforming gene (MET), mucin 1 (MUC1), mucin 4 (MUC4), mucin 16 (MUC16), New York esophageal squamous cell carcinoma 1 (NY-ESO-1), prostatic acid phosphatase (PAP), programmed cell death receptor 1 (PD-1), programmed cell death receptor ligand 1 (PD-L1), phosphatidylserine, preferentially expressed antigen of melanoma (PRAME), prostate specific antigen (PSA), protein tyrosine kinase 7 (PTK7, also known as colon carcinoma kinase 4 (CCK4)), receptor tyrosine kinase orphan receptor 1 (ROR1), scatter factor receptor kinase, sialyl-Tn, sperm-associated antigen 9 (SPAG-9), synovial sarcoma X-chromosome breakpoint 1 (SSX₁), survivin, telomerase, T-cell immunoglobulin domain and mucin domain-3 (TIM-3), vascular endothelial growth factor (VEGF) (e.g., VEGF-A), vascular endothelial growth factor Receptor 2 (VEGFR2), V-domain immunoglobulin-containing suppressor of T-cell activation (VISTA),Wilms' Tumor-1 (WT1), X chromosome antigen lb (XAGE-1b), 5T4,

[0159] Mesothelin, Glypican 3 (GPC3), Folate Receptor a (FRa), Prostate Specific Membrane Antigen (PSMA), cMET, CD38, B Cell Maturation Antigen (BCMA), CD123, CLDN6, CLDN9, LRRC15, PRLR (Prolactin Receptor), RING finger protein 43 (RNF43), Uroplakin-1 B (UPK1 B), tumor necrosis factor superfamily member 9 (TNFSF9), tumor necrosis factor receptor superfamily member 21 (TNFSRF21), bone morphogenetic protein receptor type-1B (BMPR1B), Kringle domain-containing transmembrane protein 2 (KREMEN2), Delta-like protein 3 (DLL3), Siglec7 and Siglec9. Additional exemplary cancer antigens include those found on cancer stem cells, e.g., SSEA3, SSEA4, TRA-1-60, TRA-1-81, SSEA1, CD133 (AC133), CD90 (Thy-1), CD326 (EpCAM), Cripto-1 (TDGF1), PODXL-1 (Podocalyxin-like protein 1), ABCG2, CD24, CD49f (Integrin a6), Notch2, CD146 (MCAM), CD10 (Neprilysin), CD117 (c-KIT), CD26 (DPP-4), CXCR4, CD34, CD271, CD13 (Alanine aminopeptidase), CD56 (NCAM), CD105 (Endoglin), LGRS, CD114 (CSF3R), CD54 (ICAM-1), CXCR1, 2, TIM-3 (HAVCR2), CD55 (DAF), DLL4 (Delta-like ligand 4), CD20 (MS4A1), and CD96.

[0160] The invention further provides antibody conjugates containing one or more of the fusion proteins disclosed herein. As used herein, unless otherwise indicated, the term “antibody conjugate” is understood to refer to an antibody, or a functional fragment thereof, that comprises antigen-binding activity and/or Fc receptor-binding activity, conjugated (e.g., covalently coupled) to an additional functional moiety. In certain embodiments, the antibody or functional antibody fragment is conjugated to a sialidase enzyme, e.g., a recombinant mutant human sialidase enzyme disclosed herein. In certain embodiments, an antibody conjugate comprises a single polypeptide chain. In certain embodiments, an antibody conjugate comprises two, three, four, or more polypeptide chains that are covalently or non-covalently associated together to produce a multimeric complex, e.g., a dimeric, trimeric or tetrameric complex.

[0161] TABLE 10 shows antibodies and antibody-drug conjugates suitable for use in accordance with the present invention, the antigen bound by the antibody or antibody-drug conjugate, and for certain antibodies, the type of cancer targeted by the antibody or antibody-drug conjugate.

TABLE 10

| Antibody or antibody- | | |
|---|---|---|
| drug conjugate | Cancer Antigen | Cancer Type |
| oregovomab | CA125 | |
| girentuximab | CAIX | |
| obinutuzumab | CD20 | |
| ofatumumab | CD20 | |
| rituximab | CD20 | |
| alemtuzumab | CD52 | |
| Ipilimumab | cytotoxic T-lymphocyte- | |
| | associated | |
| | antigen 4 (CTLA-4) | |
| tremelimumab | CTLA-4 | |
| Cetuximab | epidermal growth factor | |
| | receptor (EGFR) | |
| necitumumab | EGFR | |
| panitumumab | EGFR | |
| zalutumumab | EGFR | |
| edrecolomab | epithelial cell | |
| | adhesion molecule | |
| | (EpCAM) (17-1A) | |
| farletuzumab | FR-alpha | |
| Pertuzumab | human epidermal | |
| | growth factor | |
| | receptor 2 (Her2) | |
| trastuzumab | Her2 | |
| rilotumumab | HGF | |
| figitumumab | IGF-1 | |
| Ganitumab | IGF1R | |
| durvalumab | IGG1K | |
| bavituximab | Phosphatidylserine | |
| onartuzumab | scatter factor receptor | |
| bevacizumab | kinase vascular | |
| | endothelial growth | |
| | factor-A (VEGF-A) | |
| ramucirumab | vascular endothelial | |
| | growth factor | |
| | Receptor 2 (VEGFR2) | |
| blinatumomab | CD19 | acute lymphoblastic |
| | | leukemia (ALL) |
| Rituximab; | CD20 | non-Hodgkin’s |
| ofatumumab; | | lymphoma (NHL), |
| ibritumomab (e.g., | | chronic lymphocytic |
| ⁹⁰Y-ibritumomab; | | leukemia (CLL) |
| tositumomab (e.g, | | B-cell NHL |
| ¹³¹I-tositumomab | | pre-B ALL |
| brentuximab (e.g., | CD30 | Hodgkin’s |
| brentuximab vedotin | | lymphoma |
| gemtuzumab (e.g., | CD33 | acute myelogenous |
| gemtuzumab | | leukemia |
| ozogamicin | | (AML) |
| Alemtuzumab | CD52 | CLL |
| Ipilimumab | cytotoxic T-lymphocyte- | Unresectable or |
| | associated antigen 4 | metastatic |
| | (CTLA-4) | melanoma |
| cetuximab; | epidermal growth factor | colorectal cancer |
| panitumumab | receptor (EGFR) | (CRC) |
| | | Head and Neck |
| Catumaxomab | epithelial cell adhesion | Malignant ascites |
| | molecule (EpCAM) | |
| trastuzumab; | human epidermal growth | Breast |
| pertuzumab | factor receptor 2 (HER2) | |
| nivolumab; | programmed cell death | Metastatic |
| | | melanoma, |
| pembrolizumab | receptor 1 (PD-1) | non-small cell lung |
| | | cancer (NSCLC) |
| Bevacizumab | vascular endothelial | Breast, Cervical |
| | growth factor (VEGF) | CRC, NSCLC |
| | | renal cell carcinoma |
| | | (RCC), Ovarian |
| | | Glioblastoma |
| Ramucirumab | vascular endothelial | Gastric |
| | growth factor receptor 2 | NSCLC |
| | (VEGF-R2) | |
| Epratuzumab; | CD22 | acute lymphoblastic |
| moxetumomab; | | leukemia (ALL) |
| inotuzumab (e.g, | | |
| inotuzumab | | |
| ozogamicin) | | |
| MEDI9447 | CD73 | Advanced solid |
| | | tumors |
| Urelumab; | CD137 | Advanced solid |
| utomilumab (PF- | | tumors |
| 05082566) | | |
| Elotuzumab | CD2 subset 1 (CS1) | Multiple myeloma |
| Tremelimumab | cytotoxic T-lymphocyte- | Malignant |
| | associated antigen 4 | mesothelioma |
| | (CTLA-4) | |
| Necitumumab | epidermal growth factor | non-small cell lung |
| | receptor (EGFR) | cancer (NSCLC) |
| dinutuximab; | disialoganglioside | Neuroblastoma |
| hu3F8; | GD2 (GD2) | Retinoblastoma |
| hu14.18-IL-2; | | Melanoma other |
| 3F8/OKT3BsAb | | solid tumors |
| Racotumomab | Idiotype (NeuGcGM3) | NSCLC, Breast |
| | | Melanoma |
| Lirilumab | killer cell immuno- | Lymphoma |
| | globulin-like | |
| | receptor (KIR) | |
| BMS-986016 | lymphocyte activation | Breast, |
| | gene 3 (LAG-3) | Hematological, |
| | | Advanced solid |
| | | tumors |
| Onartuzumab | N-methyl-N′-nitroso- | NSCLC |
| | guanidine | |
| | human osteosarcoma | |
| | transforming | |
| | gene (MET) | |
| abagovomab; | mucin 16 (MUC16) | Ovarian |
| oregovomab | | |
| pidilizumab; | programmed cell death | B-cell lymphoma |
| AMP-224; | receptor 1 (PD-1) | Melanoma, CRC |
| AMP-514 | | |
| BMS-936559; | programmed cell | NSCLC, renal cell |
| atezolizumab; | death receptor | carcinoma (RCC) |
| durvalumab; | ligand 1 (PD-L1) | Bladder, Breast |
| avelumab | | Melanoma, |
| | | squamous cell |
| | | carcinoma of |
| | | the head |
| | | and neck (SCCHN) |
| naptumomab (e.g., | 5T4 | RCC, CRC |
| naptumomab | | Prostate |
| estafenatox) | | |

[0162] c. Linker

[0163] In certain embodiments, the sialidase portion of the fusion protein can be linked or fused directly to the antibody portion (e.g., immunoglobulin Fc domain and/or immunoglobulin antigen-binding domain) of the fusion protein. In other embodiments, the sialidase portion can be covalently bound to the antibody portion by a linker.

[0164] The linker may couple, with one or more natural amino acids, the sialidase, or functional fragment thereof, and the antibody portions or fragments, where the amino acid (for example, a cysteine amino acid) may be introduced by site-directed mutagenesis. The linker may include one or more unnatural amino acids. It is contemplated that, in certain circumstances, a linker containing for example, one or more sulfhydryl reactive groups (e.g., a maleimide) may covalently link a cysteine in the sialidase portion or the antibody portion that is a naturally occurring cysteine residue or is the product of site-specific mutagenesis.

[0165] The linker may be a cleavable linker or a non-cleavable linker. Optionally or in addition, the linker may be a flexible linker or an inflexible linker.

[0166] The linker should be a length sufficiently long to allow the sialidase and the antibody portions to be linked without steric hindrance from one another and sufficiently short to retain the intended activity of the fusion protein. The linker preferably is sufficiently hydrophilic to avoid or minimize instability of the fusion protein. The linker preferably is sufficiently hydrophilic to avoid or minimize insolubility of the fusion protein. The linker should be sufficiently stable in vivo (e.g., it is not cleaved by serum, enzymes, etc.) to permit the fusion protein to be operative in vivo.

[0167] The linker may be from about 1 angstroms (A) to about 150 Å in length, or from about 1 Å to about 120 Å in length, or from about 5 Å to about 110 Å in length, or from about 10 Å to about 100 Å in length. The linker may be greater than about 2, 3, 4, 5, 6, 7, 8, 9, 10, 11, 12, 13, 14, 15, 16, 17, 18, 19, 20, 25, 27, 30 or greater angstroms in length and/or less than about 110, 100, 90, 85, 80, 75, 70, 65, 60, 55, 50, 45, 43, 42, 41, 40, 39, 38, 37, 36, 35, 34, 33, 32, 31, or fewer A in length. Furthermore, the linker may be about 5, 10, 15, 20, 25, 30, 35, 40, 45, 50, 55, 60, 65, 70, 75, 80, 85, 90, 95, 100, 110, and 120 Å in length.

[0168] In certain embodiments, the linker comprises a polypeptide linker that connects or fuses the sialidase portion of the fusion protein to the antibody portion (e.g., immunoglobulin Fc domain and/or immunoglobulin antigen-binding domain) of the fusion protein. For example, it is contemplated that a gene encoding a sialidase portion linked directly or indirectly (for example, via an amino acid containing linker) to an antibody portion can be created and expressed using conventional recombinant DNA technologies. For example, the amino terminus of a sialidase portion can be linked to the carboxy terminus of either the light or the heavy chain of an antibody portion. For example, for a Fab fragment, the amino terminus or carboxy terminus of the sialidase can be linked to the first constant domain of the heavy antibody chain (CH₁). When a linker is employed, the linker may comprise hydrophilic amino acid residues, such as Gln, Ser, Gly, Glu, Pro, His and Arg. In certain embodiments, the linker is a peptide containing 1-25 amino acid residues, 1-20 amino acid residues, 2-15 amino acid residues, 3-10 amino acid residues, 3-7 amino acid residues, 4-25 amino acid residues, 4-20 amino acid residues, 4-15 amino acid residues, 4-10 amino acid residues, 5-25 amino acid residues, 5-20 amino acid residues, 5-15 amino acid residues, or 5-10 amino acid residues. Exemplary linkers include glycine and serine-rich linkers, e.g., (GlyGlyPro)ₙ, or (GlyGlyGlyGlySer)ₙ, where n is 1-5. In certain embodiments, the linker comprises, consists, or consists essentially of GGGGS (SEQ ID NO: 184). In certain embodiments, the linker comprises, consists, or consists essentially of GGGGSGGGGS (SEQ ID NO: 145). In certain embodiments, the linker comprises, consists, or consists essentially of EPKSS (SEQ ID NO: 146). Additional exemplary linker sequences are disclosed, e.g., in George et al. (2003) PROTEIN ENGINEERING 15:871-879, and U.S. Pat. Nos. 5,482,858 and 5,525,491.

[0169] In certain embodiments, the fusion protein comprises the amino acid sequence of any one of SEQ ID NOs: 66-85, 98-142, 150-153, 155-158, 160-163, 166-178, 185, 187, 189, or 192-197, or an amino acid sequence that has at least 85%, 90%, 95%, 96%, 97%, 98%, or 99% sequence identity to any one of SEQ ID NOs: 66-85, 98-142, 150-153, 155-158, 160-163, 166-178, 185, 187, 189, or 192-197.

[0170] d. Antibody Conjugates

[0171] The invention further provides antibody conjugates comprising a fusion protein disclosed herein. The antibody conjugate may comprise a single polypeptide chain (i.e., a fusion protein disclosed herein) or, the antibody conjugate may comprise additional polypeptide chains (e.g., one, two, or three additional polypeptide chains). For example, an antibody conjugate may comprise a first polypeptide (fusion protein) comprising a recombinant mutant human sialidase enzyme and an immunoglobulin heavy chain, and a second polypeptide comprising an immunoglobulin light chain, where, for example, the immunoglobulin heavy and light chains together define a single antigen-binding site.

[0172] In certain embodiments, the antibody conjugate can include a single sialidase. In other embodiments, the antibody conjugate can include more than one (e.g., two) sialidases. If more than one sialidase is included, the sialidases can be the same or different. In certain embodiments, the antibody conjugate can include a single antigen-binding site. In other embodiments, the antibody conjugate can include more than one (e.g., two) antigen-binding sites. If two antigen-binding sites are used, they can be the same or different. In certain embodiments, the antibody conjugate comprises an immunoglobulin Fc fragment.

[0173] In certain embodiments, the antibody conjugate comprises one or two immunoglobulin heavy chains, or a functional fragment thereof. In certain embodiments, the antibody conjugate comprises one or two immunoglobulin light chains, or a functional fragment thereof. In certain embodiments, the antibody conjugate comprises a sialidase fused to the N- or C-terminus of an immunoglobulin heavy chain or an immunoglobulin light chain.

[0174] FIG. 9 depicts exemplary antibody conjugate constructs containing one or more sialidase enzymes. For example, in FIG. 9A, a first antigen-binding site is depicted as 10, a second antigen-binding site is depicted as 20, a sialidase is depicted as 30, and a Fab is depicted as 40. In each of the constructs depicted in FIGS. 9A-9I it is understood that the Fc may optionally be modified in some manner, e.g. using Knobs-into-Holes type technology, e.g., as depicted by 50 in FIG. 9B. Throughout FIG. 9 similar structures are depicted by similar schematic representations.

[0175] FIG. 9A depicts antibody conjugate constructs comprising a first polypeptide comprising a first immunoglobulin light chain; a second polypeptide comprising a first immunoglobulin heavy chain; a third polypeptide comprising a second immunoglobulin heavy chain; and a fourth polypeptide comprising a second immunoglobulin light chain. The first and second polypeptides can be covalently linked together, the third and fourth polypeptides can be covalently linked together, and the second and third polypeptides can be covalently linked together. The covalent linkages can be disulfide bonds. In certain embodiments, the first polypeptide and the second polypeptide together define a first antigen-binding site as depicted as 10, and the third polypeptide and the fourth polypeptide together define a second antigen-binding site as depicted as 20. A sialidase enzyme as depicted as 30 can be conjugated to the N- or C-terminus of the first and second immunoglobulin light chain or the first and second immunoglobulin heavy chain.

[0176] FIG. 9B depicts antibody conjugate constructs comprising a first polypeptide comprising a first immunoglobulin light chain; a second polypeptide comprising a first immunoglobulin heavy chain; a third polypeptide comprising a second immunoglobulin heavy chain; and a fourth polypeptide comprising a second immunoglobulin light chain. The first and second polypeptides can be covalently linked together, the third and fourth polypeptides can be covalently linked together, and the second and third polypeptides can be covalently linked together. The covalent linkages can be disulfide bonds. In certain embodiments, the first polypeptide and the second polypeptide together define a first antigen-binding site, and the third polypeptide and the fourth polypeptide together define a second antigen-binding site. A sialidase enzyme can be conjugated to the N- or C-terminus of the first immunoglobulin light chain or the first immunoglobulin heavy chain.

[0177] FIG. 9C depicts antibody conjugate constructs comprising a first polypeptide comprising an immunoglobulin light chain; a second polypeptide comprising an immunoglobulin heavy chain; and a third polypeptide comprising an immunoglobulin Fc domain. The first and second polypeptides can be covalently linked together and the second and third polypeptides can be covalently linked together. The covalent linkages can be disulfide bonds. In certain embodiments, the first polypeptide and the second polypeptide together define an antigen-binding site. A sialidase enzyme can be conjugated to the N- or C-terminus of the first immunoglobulin light chain or the first immunoglobulin heavy chain.

[0178] FIG. 9D depicts antibody conjugate constructs comprising a first polypeptide comprising an immunoglobulin light chain; a second polypeptide comprising an immunoglobulin heavy chain; and a third polypeptide comprising an immunoglobulin Fc domain and a first sialidase enzyme. The first and second polypeptides can be covalently linked together and the second and third polypeptides can be covalently linked together. The covalent linkages can be disulfide bonds. The third polypeptide comprises the sialidase and the immunoglobulin Fc domain in an N- to C-terminal orientation. In certain embodiments, the first polypeptide and the second polypeptide together define an antigen-binding site. An optional second sialidase enzyme can be conjugated to the N- or C-terminus of the first immunoglobulin light chain or the first immunoglobulin heavy chain.

[0179] FIG. 9E depicts antibody conjugate constructs comprising a first polypeptide comprising an immunoglobulin light chain; a second polypeptide comprising an immunoglobulin heavy chain; and a third polypeptide comprising an immunoglobulin Fc domain and a first sialidase enzyme. The first and second polypeptides can be covalently linked together and the second and third polypeptides can be covalently linked together. The covalent linkages can be disulfide bonds. The third polypeptide comprises the immunoglobulin Fc domain and the sialidase in an N- to C-terminal orientation. In certain embodiments, the first polypeptide and the second polypeptide together define an antigen-binding site. An optional second sialidase enzyme can be conjugated to the N- or C-terminus of the first immunoglobulin light chain or the first immunoglobulin heavy chain.

[0180] FIG. 9F depicts antibody conjugate constructs comprising a first polypeptide comprising a first immunoglobulin Fc domain, and a second polypeptide comprising a second immunoglobulin Fc domain. The first and second polypeptides can be covalently linked together. The covalent linkages can be disulfide bonds. A sialidase enzyme can be conjugated to the N- or C-terminus of the first immunoglobulin Fc domain or to the N- or C-terminus of the second immunoglobulin Fc domain. An optional second sialidase enzyme can be conjugated to the N- or C-terminus of the first immunoglobulin Fc domain or to the N- or C-terminus of the second immunoglobulin Fc domain.

[0181] FIG. 9G depicts antibody conjugate constructs comprising a first polypeptide comprising an immunoglobulin light chain; and a second polypeptide comprising an immunoglobulin heavy chain variable region. The first and second polypeptides can be covalently linked together. The covalent linkages can be disulfide bonds. In certain embodiments, the first polypeptide and the second polypeptide together define an antigen-binding site. The sialidase enzyme can be conjugated to the N- or C-terminus of the immunoglobulin light chain or the immunoglobulin heavy chain variable region.

[0182] FIG. 9H depicts antibody conjugate constructs comprising a first polypeptide comprising a first immunoglobulin Fc domain, and a second polypeptide comprising a second immunoglobulin Fc domain. The first and second polypeptides can be covalently linked together. The covalent linkages can be disulfide bonds. A sialidase enzyme can be conjugated to the N-terminus of the first immunoglobulin Fc domain or the second immunoglobulin Fc domain. An optional second sialidase enzyme can be conjugated to the N-terminus of the second immunoglobulin Fc domain or the first immunoglobulin Fc domain, respectively. A single chain variable fragment (scFv) can be conjugated to the C-terminus of the first immunoglobulin Fc domain or the second immunoglobulin Fc domain. An optional second single chain variable fragment (scFv) can be conjugated to the C-terminus of the first immunoglobulin Fc domain or the second immunoglobulin Fc domain, respectively.

[0183] FIG. 9I depicts antibody conjugate constructs similar to those depicted in FIG. 9H except that each scFv is replaced with an immunoglobulin antigen binding fragment, e.g., an Fab. For example, FIG. 9I depicts antibody conjugate constructs comprising a first polypeptide comprising a first immunoglobulin Fc domain, and a second polypeptide comprising a second immunoglobulin Fc domain. The first and second polypeptides can be covalently linked together. The covalent linkages can be disulfide bonds. A sialidase enzyme can be conjugated to the N-terminus of the first immunoglobulin Fc domain or the second immunoglobulin Fc domain. An optional second sialidase enzyme can be conjugated to the N-terminus of the second immunoglobulin Fc domain or the first immunoglobulin Fc domain, respectively. An antibody fragment (Fab) can be conjugated or fused to the C-terminus of the first immunoglobulin Fc domain or the second immunoglobulin Fc domain. An optional second antibody fragment (Fab) can be conjugated or fused to the C-terminus of the second immunoglobulin Fc domain or the first immunoglobulin Fc domain, respectively. In the case of a fusion, the C terminus of the Fc domain is linked (either by a bond or an amino acid linker) to a first polypeptide chain defining an immunoglobulin antigen binding fragment. In the case of antibodies that have an antigen binding site defined by a single variable region, then this may be sufficient to impart binding affinity to a target antigen. In other instances, e.g., in the case of a human antibody, the first polypeptide chain defining an immunoglobulin antigen binding fragment can be conjugated (e.g., covalently conjugated, e.g., via a disulfide bond) to a second polypeptide chain defining an immunoglobulin antigen binding fragment, there the two antigen binding fragments together define an antigen binding site for binding the target antigen.

[0184] FIG. 10 depicts additional antibody conjugate constructs. For example, FIG. 10 depicts an antibody conjugate construct comprising a first polypeptide comprising an immunoglobulin light chain; a second polypeptide comprising an immunoglobulin heavy chain and an scFv; and a third polypeptide comprising an immunoglobulin Fc domain and a first sialidase enzyme. The first and second polypeptides can be covalently linked together and the second and third polypeptides can be covalently linked together. The covalent linkages can be disulfide bonds. The second polypeptide comprises the heavy chain and the scFv in an N- to C-terminal orientation. The third polypeptide comprises the sialidase and the immunoglobulin Fc domain in an N- to C-terminal orientation. In certain embodiments, the first polypeptide and the second polypeptide together define a first antigen-binding site. In certain embodiments, the scFv defines a second antigen-binding site. FIG. 10 depicts an additional antibody construct comprising a first polypeptide comprising an immunoglobulin light chain; a second polypeptide comprising an immunoglobulin heavy chain; and a third polypeptide comprising an immunoglobulin Fc domain and a first sialidase enzyme, wherein a Fab fragment is conjugated to the N-terminus of the immunoglobulin heavy chain. The first and second polypeptides can be covalently linked together and the second and third polypeptides can be covalently linked together. The covalent linkages can be disulfide bonds. The third polypeptide comprises the sialidase and the immunoglobulin Fc domain in an N- to C-terminal orientation. In certain embodiments, the first polypeptide and the second polypeptide together define a first antigen-binding site. In certain embodiments, the Fab fragment defines a second antigen-binding site. In each of the constructs depicted in FIG. 10 it is understood that an scFv, when present, may be replaced with a Fab fragment, or a Fab fragment, when present, may be replaced with an scFv. In each of the constructs depicted in FIG. 10, it is understood that the Fc may optionally be modified in some manner.

[0185] In certain embodiments, the antibody conjugate comprises a first polypeptide comprising a first immunoglobulin light chain; a second polypeptide comprising a first immunoglobulin heavy chain and a first sialidase; a third polypeptide comprising a second immunoglobulin heavy chain and a second sialidase; and a fourth polypeptide comprising a second immunoglobulin light chain. An example of this embodiment is shown in FIG. 11A. The first and second polypeptides can be covalently linked together, the third and fourth polypeptides can be covalently linked together, and the second and third polypeptides can be covalently linked together. The covalent linkages can be disulfide bonds. In certain embodiments, the first polypeptide and the second polypeptide together define a first antigen-binding site, and the third polypeptide and the fourth polypeptide together define a second antigen-binding site. In certain embodiments, the second and third polypeptides comprise the first and second immunoglobulin heavy chain and the first and second sialidase, respectively, in an N- to C-terminal orientation. In certain embodiments, the second and third polypeptides comprise the first and second sialidase and the first and second immunoglobulin heavy chain, respectively, in an N- to C-terminal orientation.

[0186] In certain embodiments, the antibody conjugate comprises a first polypeptide comprising an immunoglobulin light chain; a second polypeptide comprising an immunoglobulin heavy chain; and a third polypeptide comprising an immunoglobulin Fc domain and a sialidase. An example of this embodiment is shown in FIG. 11B. The first and second polypeptides can be covalently linked together and the second and third polypeptides can be covalently linked together. The covalent linkages can be disulfide bonds. In certain embodiments, the first polypeptide and the second polypeptide together define an antigen-binding site. In certain embodiments, the third polypeptide comprises the sialidase and the immunoglobulin Fc domain in an N- to C-terminal orientation, or the immunoglobulin Fc domain and the sialidase in an N- to C-terminal orientation.

[0187] In certain embodiments, the first polypeptide comprises the amino acid sequence of SEQ ID NO: 66, or an amino acid sequence that has at least 85%, 90%, 95%, 96%, 97%, 98%, or 99% sequence identity to SEQ ID NO: 66. In certain embodiments, the second polypeptide comprises the amino acid sequence of SEQ ID NO: 67 or 189 or an amino acid sequence that has at least 85%, 90%, 95%, 96%, 97%, 98%, or 99% sequence identity to SEQ ID NO: 67 or 189. In certain embodiments, the third polypeptide comprises the amino acid sequence of any one of SEQ ID NOs: 68-74, 98-112, 150, 151, 155, 156, 160, 161, 185, 187, 192, or 195, or an amino acid sequence that has at least 85%, 90%, 95%, 96%, 97%, 98%, or 99% sequence identity to any one of SEQ ID NOs: 68-74, 98-112, 150, 151, 155, 156, 160, 161, 185, 187, 192, or 195.

[0188] In certain embodiments, the third polypeptide comprises the amino acid sequence of

(SEQ ID NO: 76)
X₁X₂SX₃X₄X₅LQX₆ESVFQSGAHAYRIPALLYLPGQQSLLAFAEQRASX₇X₈
DEHAELIVX₉RRGDYDAX₁₀THQVQWX₁₁AQEVVAQAX₁₂LDGHRSMNPCPLY
DX₁₃QTGTLFLFFIAIPX₁₄X₁₅VTEX₁₆QQLQTRANVTRLX₁₇X₁₈VTSTDHGR
TWSSPRDLTDAAIGPX₁₉YREWSTFAVGPGHX₂₀LQLHDRX₂₁RSLVVPAYAY
RKLHPX₂₂QRPIPSAFX₂₃FLSHDHGRTWARGHFVAQDTX₂₄ECQVAEVETGE
QRVVTLNARSHLRARVQAQSX₂₅NX₂₆GLDFQX₂₇SQLVKKLVEPPPX₂₈GX₂₉
QGSVISFPSPRSGPGSPAQX₃₀LLYTHPTHX₃₁X₃₂QRADLGAYLNPRPPAPE
AWSEPX₃₃LLAKGSX₃₄AYSDLQSMGTGPDGSPLFGX₃₅LYEANDYEEIX₃₆F
X₃₇MFTLKQAFPAEYLPQGGGGSGGGGSDKTHTCPPCPAPELLGGPSVFLF
PPKPKDTLMISRTPEVTCVVVDVSHEDPEVKFNWYVDGVEVHNAKTKPRE
EQYNSTYRVVSVLTVLHQDWLNGKEYKCKVSNKALPAPIEKTISKAKGQP
REPQVYTLPPSREEMTKNQVSLTCLVKGFYPSDIAVEWESNGQPENNYKT
TPPVLDSDGSFFLTSKLTVDKSRWQQGNVFSCSVMHEALHNHYTQKSLSL
SPGK,

wherein X₁ is Ala, Arg, Asn, Asp, Gln, Glu, Gly, His, Leu, Lys, Met, Phe, Thr, Val, or not present, X₂ is Ala or Lys, X₃ is Asn or Leu, X₄ is Pro or His, X₅ is Phe, Trp, Tyr or Val, X₆ is Lys or Asp, X₇ is Lys, Arg, or Glu. X₈ is Lys, Ala, Arg, or Glu, X₉ is Leu or Met, X₁₀ is Pro, Asn, Asp, His, Glu, Gly, Ser or Thr, X₁₁ is Gln or His, X₁₂ is Arg or Lys, X₁₃ is Ala, Glu or Lys, X₁₄ is Gly or Asp, X₁₅ is Gln or His, X₁₆ is Gln, Arg, or Lys, X₁₇ is Ala, Cys, Ile, Ser, Val, or Leu, X₁₈ is Gln or Leu, X₁₉ is Ala or Val, X₂₀ is Cys or Gly, X₂₁ is Ala or Gly, X₂₂ is Arg, Ile, or Lys, X₂₃ is Ala, Cys, Leu, or Val, X₂₄ is Leu, Ala, or Val, X₂₅ is Thr or Ala, X₂₆ is Asp or Gly, X₂₇ is Glu or Lys, X₂₈ is Gln, Ala, His, Phe, or Pro, X₂₉ is Cys or Val, Xao is Trp or Arg, X₃₁ is Ser or Arg, X₃₂ is Trp or Lys, X₃₃ is Lys or Val, X₃₄ is Ala, Cys, Ser, or Val, X₃₅ is Cys, Leu, or Val, X₃₆ is Val or Arg, and X₃₇ is Leu, Gln, His, Ile, Lys, or Ser, and the sialidase comprises at least one mutation relative to wild-type human Neu2 (SEQ ID NO: 1).

[0189] In certain embodiments, the third polypeptide comprises the amino acid sequence of

(SEQ ID NO: 75)
X₁ASLPX₂LQX₃ESVFQSGAHAYRIPALLYLPGQQSLLAFAEQRASKKDE
HAELIVLRRGDYDAX₄THQVQWQAQEVVAQARLDGHRSMNPCPLYDX₅QT
GTLFLFFIAIPGQVTEQQQLQTRANVTRLCQVTSTDHGRTWSSPRDLTD
AAIGPAYREWSTFAVGPGHCLQLHDRARSLVVPAYAYRKLHPX₆QRPIP
SAFCFLSHDHGRTWARGHFVAQDTLECQVAEVETGEQRWTLNARSHLRA
RVQAQSTNDGLDFQESQLVKKLVEPPPX₇GCQGSVISFPSPRSGPGSPA
QWLLYTHPTHX₈X₉QRADLGAYLNPRPPAPEAWSEPVLLAKGSX₁₀AYSD
LQSMGTGPDGSPLFGCLYEANDYEEIX₁₁FX₁₂MFTLKQAFPAEYLPQGG
GGSGGGGSDKTHTCPPCPAPELLGGPSVFLFPPKPKDTLMISRTPEVTC
VVVDVSHEDPEVKENWYVDGVEVHNAKTKPREEQYNSTYRVVSVLTVLH
QDWLNGKEYKCKVSNKALPAPIEKTISKAKGQPREPQVYTLPPSREEMT
KNQVSLTCLVKGFYPSDIAVEWESNGQPENNYKTTPPVLDSDGSFFLTS
KLTVDKSRWQQGNVFSCSVMHEALHNHYTQKSLSLSPGK,

wherein X₁ is Ala, Arg, Asn, Asp, Gln, Glu, Gly, His, Leu, Lys, Met, Phe, Thr, Val, or not present, X₂ is Phe, Trp, Tyr or Val, X₃ is Lys or Asp, X₄ is Pro, Asn, Asp, His, Glu, Gly, Ser or Thr, X₅ is Ala, Glu, or Lys, X₆ is Arg, Ile, or Lys, X₇ is Gln, Ala, His, Phe, or Pro, X₈ is Ser or Arg, X₉ is Trp or Lys, X₁₀ is Ala, Cys, Ser, or Val, X₁₁ is Val or Arg, and X₁₂ is Leu, Gln, His, Ile, Lys, or Ser, and the sialidase comprises at least one mutation relative to wild-type human Neu2 (SEQ ID NO: 1). In certain embodiments, X₁ is Ala, Asp, Met, or not present, X₂ is Tyr or Val, X₃ is Lys or Asp, X₄ is Pro, Asn, Gly, Ser or Thr, X₅ is Ala or Glu, X₆ is Ile or Lys, X₇ is Gln or Ala, X₈ is Ser or Arg, X₉ is Trp or Lys, X₁₀ is Ala or Cys, X₁₁ is Val or Arg, and X₁₂ is Leu or Ile.

[0190] In certain embodiments, the third polypeptide comprises the amino acid sequence of

(SEQ ID NO: 144)
X₁X₂SX₃X₄X₅LQX₆ESVFQSGAHAYRIPALLYLPGQQSLLAFAEQRASX₇
X₈DEHAELIVX₉RRGDYDAX₁₀THQVQWX₁₁AQEVVAQAX₁₂LDGHRSMNP
CPLYDX₁₃QTGTLFLFFIAIPX₁₄X₁₅VTEX₁₆QQLQTRANVTRLX₁₇X₁₈V
TSTDHGRTWSSPRDLTDAAIGPX₁₉YREWSTFAVGPGHX₂₀LQLHDRX₂₁
RSLVVPAYAYRKLHPX₂₂QRPIPSAFX₂₃FLSHDHGRTWARGHFVAQDT
X₂₄ECQVAEVETGEQRVVTLNARSHLRARVQAQSX₂₅NX₂₆GLDFQX₂₇S
QLVKKLVEPPPX₂₈GX₂₉QGSVISFPSPRSGPGSPAQX₃₀LLYTHPTHX₃₁
X₃₂QRADLGAYLNPRPPAPEAWSEPX₃₃LLAKGSX₃₄AYSDLQSMGTGPD
GSPLFGX₃₅LYEANDYEEIX₃₆FX₃₇MFTLKQAFPAEYLPQX₃₈DKTHTCP
PCPAPELLGGPSVFLFPPKPKDTLMISRTPEVTCVVVDVSHEDPEVKF
NWYVDGVEVHNAKTKPREEQYNSTYRVVSVLTVLHQDWLNGKEYKCKV
SNKALPAPIEKTISKAKGQPREPQVYTLPPSREEMTKNQVSLTCLVKG
FYPSDIAVEWESNGQPENNYKTTPPVLDSDGSFFLTSKLTVDKSRWQQ
GNVFSCSVMHEALHNHYTQKSLSLSPGK,

wherein X₁ is Ala, Arg, Asn, Asp, Gln, Glu, Gly, His, Leu, Lys, Met, Phe, Thr, Val, or not present, X₂ is Ala or Lys, X₃ is Asn or Leu, X₄ is Pro or His, X₅ is Phe, Trp, Tyr or Val, X₆ is Lys or Asp, X₇ is Lys, Arg, or Glu. X₈ is Lys, Ala, Arg, or Glu, X₉ is Leu or Met, X₁₀ is Pro, Asn, Asp, His, Glu, Gly, Ser or Thr, X₁₁ is Gln or His, X₁₂ is Arg or Lys, X₁₃ is Ala, Glu or Lys, X₁₄ is Gly or Asp, Xis is Gln or His, X₁₆ is Gln, Arg, or Lys, X₁₇ is Ala, Cys, Ile, Ser, Val, or Leu, X₁₈ is Gln or Leu, X₁₉ is Ala or Val, X₂₀ is Cys or Gly, X₂₁ is Ala or Gly, X₂₂ is Arg, Ile, or Lys, X₂₃ is Ala, Cys, Leu, or Val, X₂₄ is Leu, Ala, or Val, X₂₅ is Thr or Ala, X₂₆ is Asp or Gly, X₂₇ is Glu or Lys, X₂₈ is Gln, Ala, His, Phe, or Pro, X₂₉ is Cys or Val, Xao is Trp or Arg, X₃₁ is Ser or Arg, X₃₂ is Trp or Lys, X₃₃ is Lys or Val, X₃₄ is Ala, Cys, Ser, or Val, X₃₅ is Cys, Leu, or Val, X₃₆ is Val or Arg, X₃₇ is Leu, Gln, His, Ile, Lys, or Ser, X₃₈ is GGGGSGGGGS (SEQ ID NO: 145) or EPKSS (SEQ ID NO: 146), and the sialidase comprises at least one mutation relative to wild-type human Neu2 (SEQ ID NO: 1).

[0191] In certain embodiments, the third polypeptide comprises the amino acid sequence of

(SEQ ID NO: 143)
X₁ASLPX₂LQX₃ESVFQSGAHAYRIPALLYLPGQQSLLAFAEQRASKKDE
HAELIVLRRGDYDAX₄THQVQWQAQEVVAQARLDGHRSMNPCPLYDX₅SQ
TGTLFLFFIAIPGQVTEQQQLQTRANVTRLCQVTSTDHGRTWSSPRDLTD
AAIGPAYREWSTFAVGPGHCLQLHDRARSLVVPAYAYRKLHPX₆QRPIPSA
FCFLSHDHGRTWARGHFVAQDTLECQVAEVETGEQRWTLNARSHLRARVQ
AQSTNDGLDFQESQLVKKLVEPPPX₇GCQGSVISFPSPRSGPGSPAQWLL
YTHPTHX₈X₉QRADLGAYLNPRPPAPEAWSEPVLLAKGSX₁₀AYSDLQSMG
TGPDGSPLFGCLYEANDYEEIX₁₁FX₁₂MFTLKQAFPAEYLPQX₁₃DKTHTC
PPCPAPELLGGPSVFLFPPKPKDTLMISRTPEVTCVVVDVSHEDPEVKFN
WYVDGVEVHNAKTKPREEQYNSTYRVVSVLTVLHQDWLNGKEYKCKVSNK
ALPAPIEKTISKAKGQPREPQVYTLPPSREEMTKNQVSLTCLVKGFYPSD
IAVEWESNGQPENNYKTTPPVLDSDGSFFLTSKLTVDKSRWQQGNVFSCS
VMHEALHNHYTQKSLSLSPGK,

wherein X₁ is Ala, Arg, Asn, Asp, Gln, Glu, Gly, His, Leu, Lys, Met, Phe, Thr, Val, or not present, X₂ is Phe, Trp, Tyr or Val, X₃ is Lys or Asp, X₄ is Pro, Asn, Asp, His, Glu, Gly, Ser or Thr, X₅ is Ala, Glu, or Lys, X₆ is Arg, Ile, or Lys, X₇ is Gln, Ala, His, Phe, or Pro, X₈ is Ser or Arg, X₉ is Trp or Lys, X₁₀ is Ala, Cys, Ser, or Val, X₁₁ is Val or

[0192] Arg, X₁₂ is Leu, Gln, His, Ile, Lys, or Ser, and X₁₃ is GGGGSGGGGS (SEQ ID NO: 145) or EPKSS (SEQ ID NO: 146), and the sialidase comprises at least one mutation relative to wild-type human Neu2 (SEQ ID NO: 1). In certain embodiments, X₁ is Ala, Asp, Met, or not present, X₂ is Tyr or Val, X₃ is Lys or Asp, X₄ is Pro, Asn, Gly, Ser or Thr, X₅ is Ala or Glu, X₆ is Ile or Lys, X₇ is Gln or Ala, X₈ is Ser or Arg, X₉ is Trp or Lys, X₁₀ is Ala or Cys, X₁₁ is Val or Arg, and X₁₂ is Leu or Ile.

[0193] In certain embodiments, the third polypeptide comprises the amino acid sequence of

(SEQ ID NO: 165)
X₁X₂SX₃X₄X₅LQX₆ESVFQSGAHAYRIPALLYLPGQQSLLAFAEQRASX₇
X₈DEHAELIVX₉RRGDYDAX₁₀THQVQWX₁₁AQEVVAQAX₁₂LX₁₃GHRSMN
PCPLYDX₁₄QTGTLFLFFIAIPX₁₅X₁₆VTEX₁₇QQLQTRANVTRLX₁₈X₁₉V
TSTDHGRTWSSPRDLTDAAIGPX₂₀YREWSTFAVGPGHX₂₁LQLHDX₂₂X₂₃
RSLVVPAYAYRKLHPX₂₄X₂₅X₂₆PIPSAFX₂₇FLSHDHGRTWARGHFVX₂₈
QDTX₂₉ECQVAEVX₃₀TGEQRVVTLNARSX₃₁X₃₂X₃₃X₃₄RX₃₅QAQSX₃₆NX₃₇
GLDFQX₃₈X₃₉QX₄₀VKKLX₄₁EPPPX₄₂GX₄₃QGSVISFPSPRSGPGSPAQ
X₄₄LLYTHPTHX₄₅X₄₆QRADLGAYLNPRPPAPEAWSEPX₄₇LLAKGSX₄₈A
YSDLQSMGTGPDGSPLFGX₄₉LYEANDYEEIX₅₀FX₅₁MFTLKQAFPAEYL
PQX₅₂DKTHTCPPCPAPELLGGPSVFLFPPKPKDTLMISRTPEVTCVVVD
VSHEDPEVKFNWYVDGVEVHNAKTKPREEQYNSTYRVVSVLTVLHQDWL
NGKEYKCKVSNKALPAPIEKTISKAKGQPREPQVYTLPPSREEMTKNQV
SLTCLVKGFYPSDIAVEWESNGQPENNYKTTPPVLDSDGSFFLTSKLTV
DKSRWQQGNVFSCSVMHEALHNHYTQKSLSLSPGK,

wherein X₁ is Ala, Arg, Asn, Asp, Gln, Glu, Gly, His, Leu, Lys, Met, Phe, Thr, Val, or not present, X₂ is Ala or Lys, X₃ is Asn or Leu, X₄ is Pro or His, X₅ is Phe, Trp, Tyr or Val, X₆ is Lys or Asp, X₇ is Lys, Arg, or Glu, X₈ is Lys, Ala, Arg, or Glu, X₉ is Leu or Met, X₁₀ is Pro, Asn, Asp, His, Glu, Gly, Ser or Thr, X₁₁ is Gln or His, X₁₂ is Arg or Lys, X₁₃ is Asp or Pro, X₁₄ is Ala, Glu or Lys, X₁₅ is Gly or Asp, X₁₆ is Gln or His, X₁₇ is Gln, Arg, or Lys, X₁₈ is Ala, Cys, Ile, Ser, Val, or Leu, X₁₉ is Gln, Leu, Glu, Phe, His, Ile, Leu, or Tyr, X₂₀ is Ala or Val, X₂₁ is Cys or Gly, X₂₂ is Arg or Pro, X₂₃ is Ala or Gly, X₂₄ is Arg, Ile, or Lys, X₂₅ is Gln or Pro, X₂₆ is Arg or Pro, X₂₇ is Ala, Cys, Leu, or Val, X₂₈ is Ala, Cys, Asn, Ser, or Thr, X₂₉ is Leu, Ala, or Val, Xao is Glu or Pro, X₃₁ is His or Pro, X₃₂ is Leu, Asp, Asn, or Tyr, X₃₃ is Arg, Ala, Asp, Leu, Gln, or Tyr, X₃₄ is Ala, Cys, Phe, Gly, His, Ile, Lys, Leu,

[0194] Met, Asn, Gln, Arg, Ser, Val, Trp, or Tyr, X₃₅ is Val, Ile, or Lys, X₃₆ is Thr or Ala, X₃₇ is Asp or Gly, X₃₈ is Glu, Lys, or Pro, X₃₉ is Ser or Cys, X₄₀ is Leu, Asp, Phe, Gln, or Thr, X₄₁ is Val or Phe, X₄₂ is Gln, Ala, His, Phe, Pro, Ser, or Thr, X₄₃ is Cys or Val, X₄₄ is Trp or Arg, X₄₅ is Ser, Arg, Ala, Asp, Glu, Phe, Gly, His, Ile, Lys, Leu, Met, Asn, Pro, Gln, Thr, Val, Trp, or Tyr, X₄₆ is Trp, Lys, Ala, Asp, Glu, Phe, Gly, His, Ile, Lys, Leu, Met, Asn, Pro, Gln, Arg, Ser, Thr, Val, or Tyr, X₄₇ is Lys or Val, X₄₈ is Ala, Cys, Ser, or Val, X₄₉ is Cys, Leu, or Val, X₅₀ is Val or Arg, X₅₁ is Leu, Gln, His, Ile, Lys, or Ser, X₅₂ is GGGGS (SEQ ID NO: 184), GGGGSGGGGS (SEQ ID NO: 145), or EPKSS (SEQ ID NO: 146), and the sialidase comprises at least one mutation relative to wild-type human Neu2 (SEQ ID NO: 1).

[0195] In certain embodiments, the third polypeptide comprises the amino acid sequence of

(SEQ ID NO: 164)
X₁ASLPX₂LQX₃ESVFQSGAHAYRIPALLYLPGQQSLLAFAEQRASKKDE
HAELIVLRRGDYDAX₄THQVQWQAQEVVAQARLDGHRSMNPCPLYDX₅QT
GTLFLFFIAIPGQVTEQQQLQTRANVTRLCX₆VTSTDHGRTWSSPRDLTD
AAIGPAYREWSTFAVGPGHCLQLHDRARSLVVPAYAYRKLHPX₇QRPIPS
AFCFLSHDHGRTWARGHFVAQDTLECQVAEVETGEQRVVTLNARSHLRX₈
RVQAQSTNDGLDFQESQLVKKLVEPPPX₉GCQGSVISFPSPRSGPGSPAQ
WLLYTHPTHX₁₀X₁₁QRADLGAYLNPRPPAPEAWSEPVLLAKGSX₁₂AYSDL
QSMGTGPDGSPLFGCLYEANDYEEIX₁₃FX₁₄MFTLKQAFPAEYLPQX₁₅DK
THTCPPCPAPELLGGPSVFLFPPKPKDTLMISRTPEVTCVVVDVSHEDPE
VKFNWYVDGVEVHNAKTKPREEQYNSTYRVVSVLTVLHQDWLNGKEYKCK
VSNKALPAPIEKTISKAKGQPREPQVYTLPPSREEMTKNQVSLTCLVKGF
YPSDIAVEWESNGQPENNYKTTPPVLDSDGSFFLTSKLTVDKSRWQQGNV
FSCSVMHEALHNHYTQKSLSLSPGK,

wherein X₁ is Ala, Arg, Asn, Asp, Gln, Glu, Gly, His, Leu, Lys, Met, Phe, Thr, Val, or not present, X₂ is Phe, Trp, Tyr or Val, X₃ is Lys or Asp, X₄ is Pro, Asn, Asp, His, Glu, Gly, Ser or Thr, X₅ is Ala, Glu, or Lys, X₆ is Gln, Leu, Glu, Phe, His, Ile, Leu, or Tyr, X₇ is Arg, Ile, or Lys, X₈ is Ala, Cys, Phe, Gly, His, Ile, Lys, Leu, Met, Asn, Gln, Arg, Ser, Val, Trp, or Tyr, X₉ is Gln, Ala, His, Phe, Pro, Ser, or Thr, X₁₀ is Ser, Arg, Ala, Asp, Glu, Phe, Gly, His, Ile, Lys, Leu, Met, Asn, Pro, Gln, Thr, Val, Trp, or Tyr, X₁₁ is Trp, Lys, Ala, Asp, Glu, Phe, Gly, His, Ile, Lys, Leu, Met, Asn, Pro, Gln, Arg, Ser, Thr, Val, or Tyr, X₁₂ is Ala, Cys, Ser, or Val, X₁₃ is Val or Arg, X₁₄ is Leu, Gln, His, Ile, Lys, or Ser, X₁₅ is GGGGS (SEQ ID NO: 184), GGGGSGGGGS (SEQ ID NO: 145), or EPKSS (SEQ ID NO: 146), and the sialidase comprises at least one mutation relative to wild-type human Neu2 (SEQ ID NO: 1). In certain embodiments, X₁ is Ala, Asp, Met, or not present, X₂ is Tyr or Val, X₃ is Lys or Asp, X₄ is Pro, Asn, Gly, Ser or Thr, X₅ is Ala or Glu, X₆ is Gln or Tyr, X₇ is Ile or Lys, X₈ is Ala or Thr, X₉ is Gln, Ala, or Thr, X₁₀ is Ser, Arg, or Ala, X₁₁ is Trp, Lys, or Arg, X₁₂ is Ala or Cys, X₁₃ is Val or Arg, and X₁₄ is Leu or Ile.

[0196] In certain embodiments, the first polypeptide comprises SEQ ID NO: 66, the second polypeptide comprises SEQ ID NO: 67, and the third polypeptide comprises SEQ ID NO: 68. In certain embodiments, the first polypeptide comprises SEQ ID NO: 66, the second polypeptide comprises SEQ ID NO: 67, and the third polypeptide comprises SEQ ID NO: 69. In certain embodiments, the first polypeptide comprises SEQ ID NO: 66, the second polypeptide comprises SEQ ID NO: 67, and the third polypeptide comprises SEQ ID NO: 70. In certain embodiments, the first polypeptide comprises SEQ ID NO: 66, the second polypeptide comprises SEQ ID NO: 67, and the third polypeptide comprises SEQ ID NO: 71. In certain embodiments, the first polypeptide comprises SEQ ID NO: 66, the second polypeptide comprises SEQ ID NO: 67, and the third polypeptide comprises SEQ ID NO: 72. In certain embodiments, the first polypeptide comprises SEQ ID NO: 66, the second polypeptide comprises SEQ ID NO: 67, and the third polypeptide comprises SEQ ID NO: 73. In certain embodiments, the first polypeptide comprises SEQ ID NO: 66, the second polypeptide comprises SEQ ID NO: 67, and the third polypeptide comprises SEQ ID NO: 74. In certain embodiments, the first polypeptide comprises SEQ ID NO: 66, the second polypeptide comprises SEQ ID NO: 67, and the third polypeptide comprises SEQ ID NO: 98.

[0197] In certain embodiments, the first polypeptide comprises SEQ ID NO: 66, the second polypeptide comprises SEQ ID NO: 67, and the third polypeptide comprises SEQ ID NO: 99. In certain embodiments, the first polypeptide comprises SEQ ID NO: 66, the second polypeptide comprises SEQ ID NO: 67, and the third polypeptide comprises SEQ ID NO: 100. In certain embodiments, the first polypeptide comprises SEQ ID NO: 66, the second polypeptide comprises SEQ ID NO: 67, and the third polypeptide comprises SEQ ID NO: 101. In certain embodiments, the first polypeptide comprises SEQ ID NO: 66, the second polypeptide comprises SEQ ID NO: 67, and the third polypeptide comprises SEQ ID NO: 102. In certain embodiments, the first polypeptide comprises SEQ ID NO: 66, the second polypeptide comprises SEQ ID NO: 67, and the third polypeptide comprises SEQ ID NO:

[0198] 103. In certain embodiments, the first polypeptide comprises SEQ ID NO: 66, the second polypeptide comprises SEQ ID NO: 67, and the third polypeptide comprises SEQ ID NO: 104. In certain embodiments, the first polypeptide comprises SEQ ID NO: 66, the second polypeptide comprises SEQ ID NO: 67, and the third polypeptide comprises SEQ ID NO: 105. In certain embodiments, the first polypeptide comprises SEQ ID NO: 66, the second polypeptide comprises SEQ ID NO: 67, and the third polypeptide comprises SEQ ID NO: 106. In certain embodiments, the first polypeptide comprises SEQ ID NO: 66, the second polypeptide comprises SEQ ID NO: 67, and the third polypeptide comprises SEQ ID NO: 107. In certain embodiments, the first polypeptide comprises SEQ ID NO: 66, the second polypeptide comprises SEQ ID NO: 67, and the third polypeptide comprises SEQ ID NO: 108. In certain embodiments, the first polypeptide comprises SEQ ID NO: 66, the second polypeptide comprises SEQ ID NO: 67, and the third polypeptide comprises SEQ ID NO:

[0199] 109. In certain embodiments, the first polypeptide comprises SEQ ID NO: 66, the second polypeptide comprises SEQ ID NO: 67, and the third polypeptide comprises SEQ ID NO: 110. In certain embodiments, the first polypeptide comprises SEQ ID NO: 66, the second polypeptide comprises SEQ ID NO: 67, and the third polypeptide comprises SEQ ID NO: 111. In certain embodiments, the first polypeptide comprises SEQ ID NO: 66, the second polypeptide comprises SEQ ID NO: 67, and the third polypeptide comprises SEQ ID NO: 112. In certain embodiments, the first polypeptide comprises SEQ ID NO: 66, the second polypeptide comprises SEQ ID NO: 67, and the third polypeptide comprises SEQ ID NO: 150. In certain embodiments, the first polypeptide comprises SEQ ID NO: 66, the second polypeptide comprises SEQ ID NO: 67, and the third polypeptide comprises SEQ ID NO:

[0200] 151. In certain embodiments, the first polypeptide comprises SEQ ID NO: 66, the second polypeptide comprises SEQ ID NO: 67, and the third polypeptide comprises SEQ ID NO: 155. In certain embodiments, the first polypeptide comprises SEQ ID NO: 66, the second polypeptide comprises SEQ ID NO: 67, and the third polypeptide comprises SEQ ID NO: 156. In certain embodiments, the first polypeptide comprises SEQ ID NO: 66, the second polypeptide comprises SEQ ID NO: 67, and the third polypeptide comprises SEQ ID NO: 160. In certain embodiments, the first polypeptide comprises SEQ ID NO: 66, the second polypeptide comprises SEQ ID NO: 67, and the third polypeptide comprises SEQ ID NO: 161. In certain embodiments, the first polypeptide comprises SEQ ID NO: 66, the second polypeptide comprises SEQ ID NO: 67, and the third polypeptide comprises SEQ ID NO:

[0201] 192. In certain embodiments, the first polypeptide comprises SEQ ID NO: 66, the second polypeptide comprises SEQ ID NO: 67, and the third polypeptide comprises SEQ ID NO: 195. In certain embodiments, the first polypeptide comprises SEQ ID NO: 66, the second polypeptide comprises SEQ ID NO: 189, and the third polypeptide comprises SEQ ID NO: 185. In certain embodiments, the first polypeptide comprises SEQ ID NO: 66, the second polypeptide comprises SEQ ID NO: 189, and the third polypeptide comprises SEQ ID NO: 187.

[0202] In certain embodiments, the antibody conjugate comprises a first polypeptide comprising a first sialidase, a first immunoglobulin Fc domain, and a first single chain variable fragment (scFv) (it is also understood that the scFv may be replaced by a first polypeptide chain of an immunoglobulin antigen binding fragment, e.g., Fab fragment); and a second polypeptide comprising a second sialidase, a second immunoglobulin Fc domain, and a second single chain variable fragment (scFv) (it is also understood that the scFv may be replaced by a second polypeptide chain of an immunoglobulin antigen binding fragment, e.g., Fab fragment). An example of this embodiment is shown in FIG. 11C. The first and second polypeptides can be covalently linked together. The covalent linkages can be disulfide bonds. In certain embodiments, the first scFv defines a first antigen-binding site, and the second scFv defines a second antigen-binding site. In certain embodiments, the first polypeptide comprises the first sialidase, the first immunoglobulin Fc domain, and the first scFv in an N- to C-terminal orientation. In certain embodiments, the first polypeptide comprises the first scFv, the first immunoglobulin Fc domain, and the first sialidase in an N- to C-terminal orientation. In certain embodiments, the second polypeptide comprises the second sialidase, the second immunoglobulin Fc domain, and the second scFv in an N- to C-terminal orientation. In certain embodiments, the second polypeptide comprises the second scFv, the second immunoglobulin Fc domain, and the second sialidase in an N- to C-terminal orientation.

[0203] In certain embodiments, the first polypeptide comprises the amino acid sequence of any one of SEQ ID NOs: 77-83, 166-178, 194, or 197, or an amino acid sequence that has at least 85%, 90%, 95%, 96%, 97%, 98%, or 99% sequence identity to any one of SEQ ID NOs: 77-83, 166-178, 194, or 197. In certain embodiments, the second polypeptide comprises the amino acid sequence of any one of SEQ ID NOs: 77-83, 166-178, 194, or 197, or an amino acid sequence that has at least 85%, 90%, 95%, 96%, 97%, 98%, or 99% sequence identity to any one of SEQ ID NOs: 77-83, 166-178, 194, or 197.

[0204] In certain embodiments, the first and/or second polypeptide comprises the amino acid sequence of

(SEQ ID NO: 85)
X₁X₂SX₃X₄X₅LQX₆ESVFQSGAHAYRIPALLYLPGQQSLLAFAEQRASX₇
X₈DEHAELIVX₉RRGDYDAX₁₀THQVQWX₁₁AQEVVAQAX₁₂LDGHRSMNPC
PLYDX₁₃QTGTLFLFFIAIPX₁₄X₁₅VTEX₁₆QQLQTRANVTRLX₁₇X₁₈VTS
TDHGRTWSSPRDLTDAAIGPX₁₉YREWSTFAVGPGHX₂₀LQLHDRX₂₁RSL
VVPAYAYRKLHPX₂₂QRPIPSAFX₂₃FLSHDHGRTWARGHFVAQDTX₂₄EC
QVAEVETGEQRVVTLNARSHLRARVQAQSX₂₅NX₂₆GLDFQX₂₇SQLVKKL
VEPPPX₂₈GX₂₉QGSVISFPSPRSGPGSPAQX₃₀LLYTHPTHX₃₁X₃₂QRAD
LGAYLNPRPPAPEAWSEPX₃₃LLAKGSX₃₄AYSDLQSMGTGPDGSPLFG
X₃₅LYEANDYEEIX₃₆FX₃₇MFTLKQAFPAEYLPQGGGGSGGGGSDKTHTC
PPCPAPELLGGPSVFLFPPKPKDTLMISRTPEVTCVVVDVSHEDPEVK
FNWYVDGVEVHNAKTKPREEQYNSTYRVVSVLTVLHQDWLNGKEYKCKV
SNKALPAPIEKTISKAKGQPREPQVYTLPPSREEMTKNQVSLTCLVKGF
YPSDIAVEWESNGQPENNYKTTPPVLDSDGSFFLYSKLTVDKSRWQQGN
VFSCSVMHEALHNHYTQKSLSLSPGKGGGGSGGGGSGGGGSEVQLVESG
GGLVQPGGSLRLSCAASGFNIKDTYIHWVRQAPGKGLEWVARIYPTNGY
TRYADSVKGRFTISADTSKNTAYLQMNSLRAEDTAVYYCSRWGGDGFYA
MDYWGQGTLVTVSSGGGGSGGGGSGGGGSDIQMTQSPSSLSASVGDRVT
ITCRASQDVNTAVAWYQQKPGKAPKLLIYSASFLYSGVPSRFSGSRSGT
DFTLTISSLQPEDFATYYCQQHYTTPPTFGQGTKVEIK,

wherein X₁ is Ala, Arg, Asn, Asp, Gln, Glu, Gly, His, Leu, Lys, Met, Phe, Thr, Val, or not present, X₂ is Ala or Lys, X₃ is Asn or Leu, X₄ is Pro or His, X₅ is Phe, Trp, Tyr or Val, X₆ is Lys or Asp, X₇ is Lys, Arg, or Glu. X₈ is Lys, Ala, Arg, or Glu, X₉ is Leu or Met, X₁₀ is Pro, Asn, Asp, His, Glu, Gly, Ser or Thr, X₁₁ is Gln or His, X₁₂ is Arg or Lys, X₁₃ is Ala, Glu or Lys, X₁₄ is Gly or Asp, X₁₅ is Gln or His, X₁₆ is Gln, Arg, or Lys, X₁₇ is Ala, Cys, Ile, Ser, Val, or Leu, X₁₈ is Gln or Leu, X₁₉ is Ala or Val, X₂₀ is Cys or Gly, X₂₁ is Ala or Gly, X₂₂ is Arg, Ile, or Lys, X₂₃ is Ala, Cys, Leu, or Val, X₂₄ is Leu, Ala, or Val, X₂₅ is Thr or Ala, X₂₆ is Asp or Gly, X₂₇ is Glu or Lys, X₂₈ is Gln, Ala, His, Phe, or Pro, X₂₉ is Cys or Val, X₃₀ is Trp or Arg, X₃₁ is Ser or Arg, X₃₂ is Trp or Lys, X₃₃ is Lys or Val, X₃₄ is Ala, Cys, Ser, or Val, X₃₅ is Cys, Leu, or Val, X₃₆ is Val or Arg, and X₃₇ is Leu, Gln, His, Ile, Lys, or Ser, and the sialidase comprises at least one mutation relative to wild-type human Neu2 (SEQ ID NO: 1).

[0205] In certain embodiments, the first and/or second polypeptide comprises the amino acid sequence of

(SEQ ID NO: 84)
X₁ASLPX₂LQX₃ESVFQSGAHAYRIPALLYLPGQQSLLAFAEQRASKKDE
HAELIVLRRGDYDAX₄THQVQWQAQEVVAQARLDGHRSMNPCPLYDX₅Q
TGTLFLFFIAIPGQVTEQQQLQTRANVTRLCQVTSTDHGRTWSSPRDLT
DAAIGPAYREWSTFAVGPGHCLQLHDRARSLVVPAYAYRKLHPX₆QRPIP
SAFCFLSHDHGRTWARGHFVAQDTLECQVAEVETGEQRWTLNARSHLRA
RVQAQSTNDGLDFQESQLVKKLVEPPPX₇GCQGSVISFPSPRSGPGSPAQ
WLLYTHPTHX₈X₉QRADLGAYLNPRPPAPEAWSEPVLLAKGSX₁₀AYSDLQ
SMGTGPDGSPLFGCLYEANDYEEIX₁₁FX₁₂MFTLKQAFPAEYLPQGGGGS
GGGGSDKTHTCPPCPAPELLGGPSVFLFPPKPKDTLMISRTPEVTCVVVD
VSHEDPEVKFNWYVDGVEVHNAKTKPREEQYNSTYRVVSVLTVLHQDWLN
GKEYKCKVSNKALPAPIEKTISKAKGQPREPQVYTLPPSREEMTKNQVSL
TCLVKGFYPSDIAVEWESNGQPENNYKTTPPVLDSDGSFFLYSKLTVDKS
RWQQGNVFSCSVMHEALHNHYTQKSLSLSPGKGGGGSGGGGSGGGGSEVQ
LVESGGGLVQPGGSLRLSCAASGFNIKDTYIHWVRQAPGKGLEWVARIYP
TNGYTRYADSVKGRFTISADTSKNTAYLQMNSLRAEDTAVYYCSRWGGDG
EYAMDYWGQGTLVTVSSGGGGSGGGGSGGGGSDIQMTQSPSSLSASVGDR
VTITCRASQDVNTAVAWYQQKPGKAPKLLIYSASFLYSGVPSRFSGSRSG
TDFTLTISSLQPEDFATYYCQQHYTTPPTFGQGTKVEIK,

wherein X₁ is Ala, Arg, Asn, Asp, Gln, Glu, Gly, His, Leu, Lys, Met, Phe, Thr, Val, or not present, X₂ is Phe, Trp, Tyr or Val, X₃ is Lys or Asp, X₄ is Pro, Asn, Asp, His, Glu, Gly, Ser or Thr, X₅ is Ala, Glu, or Lys, X₆ is Arg, Ile, or Lys, X₇ is Gln, Ala, His, Phe, or Pro, X₈ is Ser or Arg, X₉ is Trp or Lys, X₁₀ is Ala, Cys, Ser, or Val, X₁₁ is Val or Arg, and X₁₂ is Leu, Gln, His, Ile, Lys, or Ser, and the sialidase comprises at least one mutation relative to wild-type human Neu2 (SEQ ID NO: 1). In certain embodiments, X₁ is Ala, Asp, Met, or not present, X₂ is Tyr or Val, X₃ is Lys or Asp, X₄ is Pro, Asn, Gly, Ser or Thr, X₅ is Ala or Glu, X₆ is Ile or Lys, X₇ is Gln or Ala, X₈ is Ser or Arg, X₉ is Trp or Lys, X₁₀ is Ala or Cys, X₁₁ is Val or Arg, and X₁₂ is Leu or Ile.

[0206] In certain embodiments, the first and/or second polypeptide comprises the amino acid sequence of

(SEQ ID NO: 180)
X₁X₂SX₃X₄X₅LQX₆ESVFQSGAHAYRIPALLYLPGQQSLLAFAEQRASX₇
X₈DEHAELIVX₉RRGDYDAX₁₀THQVQWX₁₁AQEVVAQAX₁₂LX₁₃GHRSMNP
CPLYDX₁₄QTGTLFLFFIAIPX₁₅X₁₆VTEX₁₇QQLQTRANVTRLX₁₈X₁₉VTS
TDHGRTWSSPRDLTDAAIGPX₂₀YREWSTFAVGPGHX₂₁LQLHDX₂₂X₂₃RSL
VVPAYAYRKLHPX₂₄X₂₅X₂₆PIPSAFX₂₇FLSHDHGRTWARGHFVX₂₈QDT
X₂₉ECQVAEVX₃₀TGEQRVVTLNARSX₃₁X₃₂X₃₃X₃₄RX₃₅QAQSX₃₆NX₃₇GLD
FQX₃₈X₃₉QX₄₀VKKLX₄₁EPPPX₄₂GX₄₃QGSVISFPSPRSGPGSPAQX₄₄LLY
THPTHX₄₅X₄₆QRADLGAYLNPRPPAPEAWSEPX₄₇LLAKGSX₄₈AYSDLQSM
GTGPDGSPLFGX₄₉LYEANDYEEIX₅₀FX₅₁MFTLKQAFPAEYLPQX₅₂DKTH
TCPPCPAPELLGGPSVFLFPPKPKDTLMISRTPEVTCVVVDVSHEDPEVK
FNWYVDGVEVHNAKTKPREEQYNSTYRVVSVLTVLHQDWLNGKEYKCKVS
NKALPAPIEKTISKAKGQPREPQVYTLPPSREEMTKNQVSLTCLVKGFYP
SDIAVEWESNGQPENNYKTTPPVLDSDGSFFLYSKLTVDKSRWQQGNVFS
CSVMHEALHNHYTOKSLSLSPGKGGGGSGGGGSGGGGSEVQLVESGGGLV
QPGGSLRLSCAASGFNIKDTYIHWVRQAPGKGLEWVARIYPTNGYTRYAD
SVKGRFTISADTSKNTAYLQMNSLRAEDTAVYYCSRWGGDGFYAMDYWGQ
GTLVTVSSGGGGSGGGGSGGGGSDIQMTQSPSSLSASVGDRVTITCRASQ
DVNTAVAWYQQKPGKAPKLLIYSASFLYSGVPSRFSGSRSGTDFTLTISS
LQPEDFATYYCQQHYTTPPTFGQGTKVEIK,

wherein X₁ is Ala, Arg, Asn, Asp, Gln, Glu, Gly, His, Leu, Lys, Met, Phe, Thr, Val, or not present, X₂ is Ala or Lys, X₃ is Asn or Leu, X₄ is Pro or His, X₅ is Phe, Trp, Tyr or Val, X₆ is Lys or Asp, X₇ is Lys, Arg, or Glu, X₈ is Lys, Ala, Arg, or Glu, X₉ is Leu or Met, X₁₀ is Pro, Asn, Asp, His, Glu, Gly, Ser or Thr, X₁₁ is Gln or His, X₁₂ is Arg or Lys, X₁₃ is Asp or Pro, X₁₄ is Ala, Glu or Lys, X₁₅ is Gly or Asp, X₁₆ is Gln or His, X₁₇ is Gln, Arg, or Lys, X₁₈ is Ala, Cys, Ile, Ser, Val, or Leu, X₁₉ is Gln, Leu, Glu, Phe, His, Ile, Leu, or Tyr, X₂₀ is Ala or Val, X₂₁ is Cys or Gly, X₂₂ is Arg or Pro, X₂₃ is Ala or Gly, X₂₄ is Arg, Ile, or Lys, X₂₅ is Gln or Pro, X₂₆ is Arg or Pro, X₂₇ is Ala, Cys, Leu, or Val, X₂₈ is Ala, Cys, Asn, Ser, or Thr, X₂₉ is Leu, Ala, or Val, Xao is Glu or Pro, X₃₁ is His or Pro, X₃₂ is Leu, Asp, Asn, or Tyr, X₃₃ is Arg, Ala, Asp, Leu, Gln, or Tyr, X₃₄ is Ala, Cys, Phe, Gly, His, Ile, Lys, Leu, Met, Asn, Gln, Arg, Ser, Val, Trp, or Tyr, X₃₅ is Val, Ile, or Lys, X₃₆ is Thr or Ala, X₃₇ is Asp or Gly, X₃₈ is Glu, Lys, or Pro, X₃₉ is Ser or Cys, X₄₀ is Leu, Asp, Phe, Gln, or Thr, X₄₁ is Val or Phe, X₄₂ is Gln, Ala, His, Phe, Pro, Ser, or Thr, X₄₃ is Cys or Val, X₄₄ is Trp or Arg, X₄₅ is Ser, Arg, Ala, Asp, Glu, Phe, Gly, His, Ile, Lys, Leu, Met, Asn, Pro, Gln, Thr, Val, Trp, or Tyr, X₄₆ is Trp, Lys, Ala, Asp, Glu, Phe, Gly, His, Ile, Lys, Leu, Met, Asn, Pro, Gln, Arg, Ser, Thr, Val, or Tyr, X₄₇ is Lys or Val, X₄₈ is Ala, Cys, Ser, or Val, X₄₉ is Cys, Leu, or Val, X₅₀ is Val or Arg, X₅₁ is Leu, Gln, His, Ile, Lys, or Ser, X₅₂ is GGGGS (SEQ ID NO: 184), GGGGSGGGGS (SEQ ID NO: 145), or EPKSS (SEQ ID NO: 146), and the sialidase comprises at least one mutation relative to wild-type human Neu2 (SEQ ID NO: 1).

[0207] In certain embodiments, the first and/or second polypeptide comprises the amino acid sequence of

(SEQ ID NO: 179)
X₁ASLPX₂LQX₃ESVFQSGAHAYRIPALLYLPGQQSLLAFAEQRASKKDE
HAELIVLRRGDYDAX₄THQVQWQAQEVVAQARLDGHRSMNPCPLYDX₅QT
GTLFLFFIAIPGQVTEQQQLQTRANVTRLCX₆VTSTDHGRTWSSPRDLT
DAAIGPAYREWSTFAVGPGHCLQLHDRARSLVVPAYAYRKLHPX₇QRPI
PSAFCFLSHDHGRTWARGHFVAQDTLECQVAEVETGEQRVVTLNARSHL
RX₈RVQAQSTNDGLDFQESQLVKKLVEPPPX₉GCQGSVISFPSPRSGPGS
PAQWLLYTHPTHX₁₀X₁₁QRADLGAYLNPRPPAPEAWSEPVLLAKGSX₁₂A
YSDLQSMGTGPDGSPLFGCLYEANDYEEIX₁₃FX₁₄MFTLKQAFPAEYLPQ
X₁₅DKTHTCPPCPAPELLGGPSVFLFPPKPKDTLMISRTPEVTCVVVDVS
HEDPEVKFNWYVDGVEVHNAKTKPREEQYNSTYRVVSVLTVLHQDWLNG
KEYKCKVSNKALPAPIEKTISKAKGQPREPQVYTLPPSREEMTKNQVSL
TCLVKGFYPSDIAVEWESNGQPENNYKTTPPVLDSDGSFFLYSKLTVDK
SRWQQGNVFSCSVMHEALHNHYTQKSLSLSPGKGGGGSGGGGSGGGGSE
VQLVESGGGLVQPGGSLRLSCAASGFNIKDTYIHWVRQAPGKGLEWVAR
IYPTNGYTRYADSVKGRFTISADTSKNTAYLQMNSLRAEDTAVYYCSRW
GGDGFYAMDYWGQGTLVTVSSGGGGSGGGGSGGGGSDIQMTQSPSSLSA
SVGDRVTITCRASQDVNTAVAWYQQKPGKAPKLLIYSASFLYSGVPSRF
SGSRSGTDFTLTISSLQPEDFATYYCQQHYTTPPTFGQGTKVEIK,

wherein X₁ is Ala, Arg, Asn, Asp, Gln, Glu, Gly, His, Leu, Lys, Met, Phe, Thr, Val, or not present, X₂ is Phe, Trp, Tyr or Val, X₃ is Lys or Asp, X₄ is Pro, Asn, Asp, His, Glu, Gly, Ser or Thr, X₅ is Ala, Glu, or Lys, X₆ is Gln, Leu, Glu, Phe, His, Ile, Leu, or Tyr, X₇ is Arg, Ile, or Lys, X₈ is Ala, Cys, Phe, Gly, His, Ile, Lys, Leu, Met, Asn, Gln, Arg, Ser, Val, Trp, or Tyr, X₉ is Gln, Ala, His, Phe, Pro, Ser, or Thr, X₁₀ is Ser, Arg, Ala, Asp, Glu, Phe, Gly, His, Ile, Lys, Leu, Met, Asn, Pro, Gln, Thr, Val, Trp, or Tyr, X₁₁ is Trp, Lys, Ala, Asp, Glu, Phe, Gly, His, Ile, Lys, Leu, Met, Asn, Pro, Gln, Arg, Ser, Thr, Val, or Tyr, X₁₂ is Ala, Cys, Ser, or Val, X₁₃ is Val or Arg, X₁₄ is Leu, Gln, His, Ile, Lys, or Ser, X₁₅ is GGGGS (SEQ ID NO: 184), GGGGSGGGGS (SEQ ID NO: 145), or EPKSS (SEQ ID NO: 146), and the sialidase comprises at least one mutation relative to wild-type human Neu2 (SEQ ID NO: 1). In certain embodiments, X₁ is Ala, Asp, Met, or not present, X₂ is Tyr or Val, X₃ is Lys or Asp, X₄ is Pro, Asn, Gly, Ser or Thr, X₅ is Ala or Glu, X₆ is Gln or Tyr, X₇ is Ile or Lys, X₈ is Ala or Thr, X₉ is Gln, Ala, or Thr, X₁₀ is Ser, Arg, or Ala, X₁₁ is Trp, Lys, or Arg, X₁₂ is Ala or Cys, X₁₃ is Val or Arg, and X₁₄ is Leu or Ile.

[0208] In certain embodiments, the first and second polypeptide comprise SEQ ID NO: 77. In certain embodiments, the first and second polypeptide comprise SEQ ID NO: 78. In certain embodiments, the first and second polypeptide comprise SEQ ID NO: 79. In certain embodiments, the first and second polypeptide comprise SEQ ID NO: 80. In certain embodiments, the first and second polypeptide comprise SEQ ID NO: 81. In certain embodiments, the first and second polypeptide comprise SEQ ID NO: 82. In certain embodiments, the first and second polypeptide comprise SEQ ID NO: 83. In certain embodiments, the first and second polypeptide comprise SEQ ID NO: 166. In certain embodiments, the first and second polypeptide comprise SEQ ID NO: 167. In certain embodiments, the first and second polypeptide comprise SEQ ID NO: 168. In certain embodiments, the first and second polypeptide comprise SEQ ID NO: 169. In certain embodiments, the first and second polypeptide comprise SEQ ID NO: 170. In certain embodiments, the first and second polypeptide comprise SEQ ID NO: 171. In certain embodiments, the first and second polypeptide comprise SEQ ID NO: 172. In certain embodiments, the first and second polypeptide comprise SEQ ID NO: 173. In certain embodiments, the first and second polypeptide comprise SEQ ID NO: 174. In certain embodiments, the first and second polypeptide comprise SEQ ID NO: 175. In certain embodiments, the first and second polypeptide comprise SEQ ID NO: 176. In certain embodiments, the first and second polypeptide comprise SEQ ID NO: 177. In certain embodiments, the first and second polypeptide comprise SEQ ID NO: 178. In certain embodiments, the first and second polypeptide comprise SEQ ID NO: 194. In certain embodiments, the first and second polypeptide comprise SEQ ID NO: 197.

[0209] In certain embodiments, the antibody conjugate comprises: a first polypeptide comprising an immunoglobulin light chain; a second polypeptide comprising an immunoglobulin heavy chain and a single chain variable fragment (scFv) (it is also understood that the scFv may be replaced by a first polypeptide chain of an immunoglobulin antigen binding fragment, e.g., Fab fragment); and a third polypeptide comprising an immunoglobulin Fc domain and a sialidase. An example of this embodiment is shown in FIG. 11D. The first and second polypeptides can be covalently linked together and the second and third polypeptides can be covalently linked together. The covalent linkages can be disulfide bonds. In certain embodiments, the first polypeptide and the second polypeptide together define a first antigen-binding site (i.e., the immunoglobulin light chain and immunoglobulin heavy chain together define a first antigen-binding site). In certain embodiments, the scFv defines a second antigen-binding site. In certain embodiments, the second polypeptide comprises the immunoglobulin heavy chain and the scFv in an N- to C-terminal orientation, or the scFv and the immunoglobulin heavy chain in an N- to C-terminal orientation. In certain embodiments, the third polypeptide comprises the sialidase and the immunoglobulin Fc domain in an N- to C-terminal orientation, or the sialidase and the immunoglobulin Fc domain in an N- to C-terminal orientation.

[0210] In certain embodiments, the antibody conjugate has a molecular weight from about 135 kDa to about 165 kDa, e.g., about 140 kDa. In other embodiments, the antibody conjugate has a molecular weight from about 215 kDa to about 245 kDa, e.g., about 230 kDa.

[0211] In certain embodiments, the antibody conjugate comprises two polypeptides that each comprise an immunoglobulin Fc domain, and the first polypeptide has either a “knob” mutation, e.g., T366Y, or a “hole” mutation, e.g., Y407T, for heterodimerization with the second polypeptide, and the second polypeptide has either a respective “knob” mutation, e.g., T366Y, or a “hole” mutation, e.g., Y407T, for heterodimerization with the first polypeptide (residue numbers according to EU numbering, Kabat, E.A., et al. (1991) supra). For example, in certain embodiments, the antibody comprises two polypeptides that each comprise an immunoglobulin Fc domain derived from human IgG1 Fc domain, and the first polypeptide comprises a Y407T mutation (e.g., the first polypeptide comprises SEQ ID NO: 32 or SEQ ID NO: 147), and the second polypeptide comprises a T366Y mutation (e.g., the second polypeptide comprises SEQ ID NO: 33 or SEQ ID NO: 148).

[0212] As used herein, the term “multispecific antibody” is understood to mean an antibody that specifically binds to at least two different antigens, i.e., an antibody that comprises at least two antigen-binding sites that bind to at least two different antigens. As used herein, the term “bispecific antibody” is understood to mean an antibody that specifically binds to two different antigens, i.e., an antibody that comprises two antigen-binding sites each of which bind to separate and distinct antigens. In other words, a first binding site binds a first antigen and a second binding site binds a second, different antigen. A multispecific or bispecific antibody may, for example, be a human or humanized antibody, and/or be a full length antibody or an antibody fragment (e.g., a F(ab′)₂ bispecific antibody).

[0213] The present invention encompasses antibody conjugates comprising antibody fragments, which may be generated by traditional means, such as enzymatic digestion, or by recombinant techniques. For a review of certain antibody fragments, see Hudson et al. (2003) supra.

[0214] In certain embodiments, the antibody conjugate or fusion protein can be covalently or non-covalently associated with a biological modifier, wherein the biological modifier can be used to enhance the solubility of the antibody, increase binding specificity, decrease immunogenicity or toxicity or modify the pharmacokinetic profile of the antibody. For example, the biological modifier can be used to increase the molecular weight of the antibody to increase its circulating half-life.

[0215] It is contemplated that the antibody conjugate or fusion protein may be covalently bound to one or more (for example, 2, 3, 4, 5, 6, 8, 9, 10 or more) biological modifiers that may comprise linear or branched polymers. Exemplary biological modifiers may include, for example, a variety of polymers, such as those described in U.S. Pat. No. 7,842,789. Particularly useful are polyalkylene ethers such as polyethylene glycol (PEG) and derivatives thereof (for example, alkoxy polyethylene glycol, for example, methoxypolyethylene glycol, ethoxypolyethylene glycol and the like); block copolymers of polyoxyethylene and polyoxypropylene (Pluronics); polymethacrylates; carbomers; and branched or unbranched polysaccharides which comprise the saccharide monomers such as D-mannose, D- and L-galactose, fucose, fructose, D-xylose, L-arabinose, and D-glucuronic acid.

[0216] In other embodiments, the biological modifier can be a hydrophilic polyvinyl polymer such as polyvinyl alcohol and polyvinylpyrrolidone (PVP)-type polymers. The biological modifier can be a functionalized polyvinylpyrrolidone, for example, carboxy or amine functionalized on one (or both) ends of the polymer (as available from PolymerSource). Alternatively, the biological modifier can include Poly N-(2-hydroxypropyl)methacrylamide (HPMA), or functionalized HPMA (amine, carboxy, etc.), Poly(N-isopropylacrylamide) or functionalized poly(N-isopropylacrylamide). Alternatively, the biological modifier can include Poly N-(2-hydroxypropyl)methacrylamide (HPMA), or functionalized HPMA (amine, carboxy, etc.), Poly(N-isopropylacrylamide) or functionalized poly(N-isopropylacrylamide). The modifier prior to conjugation need not be, but preferably is, water soluble, but the final conjugate should be water soluble.

[0217] In general, the biological modifier may have a molecular weight from about 2 kDa to about 5 kDa, from about 2 kDa to about 10 kDa, from about 2 kDa to about 20 kDa, from about 2 kDa to about 30 kDa, from about 2 kDa to about 40 kDa, from about 2 kDa to about 50 kDa, from about 2 kDa to about 60 kDa, from about 2 kDa to about 70 kDa, from about 2 kDa to about 80 kDa, from about 2 kDa to about 90 kDa, from about 2 kDa to about 100 kDa, from about 2 kDa to about 150 kDa, from about 5 kDa to about 10 kDa, from about 5 kDa to about 20 kDa, from about 5 kDa to about 30 kDa, from about 5 kDa to about 40 kDa, from about 5 kDa to about 50 kDa, from about 5 kDa to about 60 kDa, from about 5 kDa to about 70 kDa, from about 5 kDa to about 80 kDa, from about 5 kDa to about 90 kDa, from about 5 kDa to about 100 kDa, from about 5 kDa to about 150 kDa, from about 10 kDa to about 20 kDa, from about 10 kDa to about 30 kDa, from about 10 kDa to about 40 kDa, from about 10 kDa to about 50 kDa, from about 10 kDa to about 60 kDa, from about 10 kDa to about 70 kDa, from about 10 kDa to about 80 kDa, from about 10 kDa to about 90 kDa, from about 10 kDa to about 100 kDa, from about 10 kDa to about 150 kDa, from about 20 kDa to about 30 kDa, from about 20 kDa to about 40 kDa, from about 20 kDa to about 50 kDa, from about 20 kDa to about 60 kDa, from about 20 kDa to about 70 kDa, from about 20 kDa to about 80 kDa, from about 20 kDa to about 90 kDa, from about 20 kDa to about 100 kDa, from about 20 kDa to about 150 kDa, from about 30 kDa to about 40 kDa, from about 30 kDa to about 50 kDa, from about 30 kDa to about 60 kDa, from about 30 kDa to about 70 kDa, from about 30 kDa to about 80 kDa, from about 30 kDa to about 90 kDa, from about 30 kDa to about 100 kDa, from about 30 kDa to about 150 kDa, from about 40 kDa to about 50 kDa, from about 40 kDa to about 60 kDa, from about 40 kDa to about 70 kDa, from about 40 kDa to about 80 kDa, from about 40 kDa to about 90 kDa, from about 40 kDa to about 100 kDa, from about 40 kDa to about 150 kDa, from about 50 kDa to about 60 kDa, from about 50 kDa to about 70 kDa, from about 50 kDa to about 80 kDa, from about 50 kDa to about 90 kDa, from about 50 kDa to about 100 kDa, from about 50 kDa to about 150 kDa, from about 60 kDa to about 70 kDa, from about 60 kDa to about 80 kDa, from about 60 kDa to about 90 kDa, from about 60 kDa to about 100 kDa, from about 60 kDa to about 150 kDa, from about 70 kDa to about 80 kDa, from about 70 kDa to about 90 kDa, from about 70 kDa to about 100 kDa, from about 70 kDa to about 150 kDa, from about 80 kDa to about 90 kDa, from about 80 kDa to about 100 kDa, from about 80 kDa to about 150 kDa, from about 90 kDa to about 100 kDa, from about 90 kDa to about 150 kDa, or from about 100 kDa to about 150 kDa.

[0218] It is contemplated that the antibody conjugate or fusion protein is attached to about 10 or fewer polymer molecules (e.g., 9, 8, 7, 6, 5, 4, 3, 2, or 1), each polymer molecule having a molecular weight of at least about 20,000 D, or at least about 30,000 D, or at least about 40,000 D.

[0219] Although a variety of polymers can be used as biological modifiers, it is contemplated that the antibody conjugates or fusion proteins described herein may be attached to polyethylene glycol (PEG) polymers. In one embodiment, the antibody conjugate or fusion protein described herein is covalently attached to at least one PEG having an actual MW of at least about 20,000 D. In another embodiment, the antibody conjugate or fusion protein described herein is covalently attached to at least one PEG having an actual MW of at least about 30,000 D. In another embodiment, the antibody conjugate or fusion protein described herein is covalently attached to at least one PEG having an actual MW of at least about 40,000 D. In certain embodiments, the PEG is methoxyPEG(5000)-succinimidylpropionate (mPEG-SPA), methoxyPEG(5000)-succinimidylsuccinate (mPEG-SS). Such PEGS are commercially available from Nektar Therapeutics or SunBiowest.

[0220] Attachment sites on an antibody conjugate or fusion protein for a biological modifier include the N-terminal amino group and epsilon amino groups found on lysine residues, as well as other amino, imino, carboxyl, sulfhydryl, hydroxyl or other hydrophilic groups. The polymer may be covalently bonded directly to the antibody conjugate or fusion protein with or without the known use of a multifunctional (ordinarily bifunctional) crosslinking agent using chemistries and used in the art. For example, sulfhydryl groups can be derivatized by coupling to maleimido-substituted PEG (e.g. alkoxy-PEG amine plus sulfosuccinimidyl 4-(N-maleimidomethyl)cyclohexane-1-carboxylate), or PEG-maleimide commercially available from Shearwater Polymers, Inc., Huntsville, Ala.).

[0221] III. Methods of Making a Recombinant Human Sialidase, Fusion Protein, or Antibody Conjugate

[0222] Methods for producing recombinant human sialidases, fusion proteins, e.g., those disclosed herein, antibodies, or antibody conjugates, e.g., those disclosed herein, are known in the art. For example, DNA molecules encoding light chain variable regions and/or heavy chain variable regions can be synthesized chemically or by recombinant DNA methodologies. For example, the sequences of the antibodies can be cloned from hybridomas by conventional hybridization techniques or polymerase chain reaction (PCR) techniques, using the appropriate synthetic nucleic acid primers. The resulting DNA molecules encoding the variable regions of interest can be ligated to other appropriate nucleotide sequences, including, for example, constant region coding sequences, and expression control sequences, to produce conventional gene expression constructs (i.e., expression vectors) encoding the desired antibodies. Production of defined gene constructs is within routine skill in the art.

[0223] Nucleic acids encoding desired recombinant human sialidases, fusion proteins, and/or antibody conjugates can be incorporated (ligated) into expression vectors, which can be introduced into host cells through conventional transfection or transformation techniques. Exemplary host cells are E. coli cells, Chinese hamster ovary (CHO) cells, human embryonic kidney 293 (HEK 293) cells, HeLa cells, baby hamster kidney (BHK) cells, monkey kidney cells (COS), human hepatocellular carcinoma cells (e.g., Hep G2), and myeloma cells that do not otherwise produce IgG protein. Transformed host cells can be grown under conditions that permit the host cells to express the genes that encode the immunoglobulin light and/or heavy chain variable regions.

[0224] Specific expression and purification conditions will vary depending upon the expression system employed. For example, if a gene is to be expressed in E. coli, it is first cloned into an expression vector by positioning the engineered gene downstream from a suitable bacterial promoter, e.g., Trp or Tac, and a prokaryotic signal sequence. The expressed protein may be secreted. The expressed protein may accumulate in refractile or inclusion bodies, which can be harvested after disruption of the cells by French press or sonication. The refractile bodies then are solubilized, and the protein may be refolded and/or cleaved by methods known in the art.

[0225] If the engineered gene is to be expressed in eukaryotic host cells, e.g., CHO cells, it is first inserted into an expression vector containing a suitable eukaryotic promoter, a secretion signal, a poly A sequence, and a stop codon. Optionally, the vector or gene construct may contain enhancers and introns. In embodiments involving fusion proteins comprising an antibody or portion thereof, the expression vector optionally contains sequences encoding all or part of a constant region, enabling an entire, or a part of, a heavy or light chain to be expressed. The gene construct can be introduced into eukaryotic host cells using conventional techniques.

[0226] The host cells express a recombinant human sialidase or a fusion protein and/or antibody conjugate comprising a sialidase and V_{L} or V_{H} fragments, V_{L}-V_{H} heterodimers, V_{H}-V_{L} or V_{L}-V_{H} single chain polypeptides, complete heavy or light immunoglobulin chains, or portions thereof, each of which may be attached to a moiety having another function (e.g., cytotoxicity). In some embodiments involving fusion proteins and/or antibody conjugates, a host cell is transfected with a single vector expressing a polypeptide expressing a sialidase and an entire, or part of, a heavy chain (e.g., a heavy chain variable region) or a sialidase and a light chain (e.g., a light chain variable region), or a polypeptide expressing an entire, or part of, a heavy chain (e.g., a heavy chain variable region) or a light chain (e.g., a light chain variable region). In some embodiments, a host cell is transfected with a single vector encoding (a) a polypeptide comprising a heavy chain variable region and a polypeptide comprising a light chain variable region, or (b) an entire immunoglobulin heavy chain and an entire immunoglobulin light chain, wherein in (a) or in (b), the polypeptide may also comprise a sialidase. In some embodiments, a host cell is co-transfected with more than one expression vector (e.g., one expression vector expressing a polypeptide comprising an entire, or part of, a heavy chain or heavy chain variable region, optionally comprising a sialidase fused thereto, and another expression vector expressing a polypeptide comprising an entire, or part of, a light chain or light chain variable region, optionally comprising a sialidase fused thereto).

[0227] A polypeptide comprising a sialidase or a fusion protein, e.g., a fusion protein comprising an immunoglobulin heavy chain variable region or light chain variable region, can be produced by growing (culturing) a host cell transfected with an expression vector encoding such a variable region, under conditions that permit expression of the polypeptide. Following expression, the polypeptide can be harvested and purified or isolated using techniques known in the art, e.g., affinity tags such as glutathione-S-transferase (GST) or histidine tags.

[0228] In embodiments in which a fusion protein and/or antibody conjugate is produced, a sialidase fused to a monoclonal antibody, Fc domain, or an antigen-binding domain of the antibody, can be produced by growing (culturing) a host cell transfected with: (a) an expression vector that encodes a complete or partial immunoglobulin heavy chain, and a separate expression vector that encodes a complete or partial immunoglobulin light chain; or (b) a single expression vector that encodes both chains (e.g., complete or partial heavy and light chains), under conditions that permit expression of both chains. The sialidase will be fused to one or more of the chains. The intact fusion protein and/or antibody conjugate can be harvested and purified or isolated using techniques known in the art, e.g., Protein A, Protein G, affinity tags such as glutathione-S-transferase (GST) or histidine tags. It is within ordinary skill in the art to express the heavy chain and the light chain from a single expression vector or from two separate expression vectors.

[0229] In certain embodiments, in order to express a protein, e.g., a recombinant human sialidase, as a secreted protein, a native N-terminal signal sequence of the protein is replaced, e.g., with MDMRVPAQLLGLLLLWLPGARC (SEQ ID NO: 28). In certain embodiments, to express a protein, e.g., a recombinant human sialidase, as a secreted protein, an N-terminal signal sequence, e.g., MDMRVPAQLLGLLLLWLPGARC (SEQ ID NO: 28), is added. Additional exemplary N-terminal signal sequences include signal sequences from interleukin-2, CD-5, IgG kappa light chain, trypsinogen, serum albumin, and prolactin. In certain embodiments, in order to express a protein, e.g., a recombinant human sialidase, as a secreted protein, a C terminal lysosomal signal motif, e.g., YGTL (SEQ ID NO: 29) is removed.

[0230] Methods for reducing or eliminating the antigenicity of antibodies and antibody fragments are known in the art. When the antibodies are to be administered to a human, the antibodies preferably are “humanized” to reduce or eliminate antigenicity in humans. Preferably, each humanized antibody has the same or substantially the same affinity for the antigen as the non-humanized mouse antibody from which it was derived.

[0231] In one humanization approach, chimeric proteins are created in which mouse immunoglobulin constant regions are replaced with human immunoglobulin constant regions. See, e.g., Morrison et al., 1984, PROC. NAT. ACAD. SCI. 81:6851-6855, Neuberger et al., 1984, NATURE 312:604-608; U.S. Pat. No. 6,893,625 (Robinson); U.S. Pat. No. 5,500,362 (Robinson); and U.S. Pat. No. 4,816,567 (Cabilly).

[0232] In an approach known as CDR grafting, the CDRs of the light and heavy chain variable regions are grafted into frameworks from another species. For example, murine CDRs can be grafted into human FRs. In some embodiments, the CDRs of the light and heavy chain variable regions of an antibody are grafted into human FRs or consensus human FRs. To create consensus human FRs, FRs from several human heavy chain or light chain amino acid sequences are aligned to identify a consensus amino acid sequence. CDR grafting is described in U.S. Pat. No. 7,022,500 (Queen); U.S. Pat. No. 6,982,321 (Winter); U.S. Pat. No. 6,180,370 (Queen); U.S. Pat. No. 6,054,297 (Carter); U.S. Pat. No. 5,693,762 (Queen); U.S. Pat. No. 5,859,205 (Adair); U.S. Pat. No. 5,693,761 (Queen); U.S. Pat. No. 5,565,332 (Hoogenboom); U.S. Pat. No. 5,585,089 (Queen); U.S. Pat. No. 5,530,101 (Queen); Jones et al. (1986) NATURE 321: 522-525; Riechmann et al. (1988) NATURE 332: 323-327; Verhoeyen et al. (1988) SCIENCE 239: 1534-1536; and Winter (1998) FEBS LETT 430: 92-94.

[0233] In an approach called “SUPERHUMANIZATION^{TM},” human CDR sequences are chosen from human germline genes, based on the structural similarity of the human CDRs to those of the mouse antibody to be humanized. See, e.g., U.S. Patent No. 6,881,557 (Foote); and Tan et al., 2002, J. IMMUNOL. 169:1119-1125.

[0234] Other methods to reduce immunogenicity include “reshaping,” “hyperchimerization,” and “veneering/resurfacing.” See, e.g., Vaswami et al., 1998, ANNALS OF ALLERGY, ASTHMA, & IMMUNOL. 81:105; Roguska et al., 1996, PROT. ENGINEER 9:895-904; and U.S. Pat. No. 6,072,035 (Hardman). In the veneering/resurfacing approach, the surface accessible amino acid residues in the murine antibody are replaced by amino acid residues more frequently found at the same positions in a human antibody. This type of antibody resurfacing is described, e.g., in U.S. Pat. No. 5,639,641 (Pedersen).

[0235] Another approach for converting a mouse antibody into a form suitable for medical use in humans is known as ACTIVMAB™ technology (Vaccinex, Inc., Rochester, NY), which involves a vaccinia virus-based vector to express antibodies in mammalian cells. High levels of combinatorial diversity of IgG heavy and light chains can be produced. See, e.g., U.S. Pat. No. 6,706,477 (Zauderer); U.S. Pat. No. 6,800,442 (Zauderer); and U.S. Pat. No. 6,872,518 (Zauderer).

[0236] Another approach for converting a mouse antibody into a form suitable for use in humans is technology practiced commercially by KaloBios Pharmaceuticals, Inc. (Palo Alto, CA). This technology involves the use of a proprietary human “acceptor” library to produce an “epitope focused” library for antibody selection. Another approach for modifying a mouse antibody into a form suitable for medical use in humans is HUMAN ENGINEERING™ technology, which is practiced commercially by XOMA (US) LLC. See, e.g., International (PCT) Publication No. WO 93/11794 and U.S. Pat. No. 5,766,886 (Studnicka); U.S. Pat. No. 5,770,196 (Studnicka); U.S. Pat. No. 5,821,123 (Studnicka); and U.S. Pat. No. 5,869,619 (Studnicka).

[0237] Any suitable approach, including any of the above approaches, can be used to reduce or eliminate human immunogenicity of an antibody.

[0238] In addition, it is possible to create fully human antibodies in mice. Fully human mAbs lacking any non-human sequences can be prepared from human immunoglobulin transgenic mice by techniques referenced in, e.g., Lonberg et al., NATURE 368:856-859, 1994; Fishwild et al., NATURE BIOTECHNOLOGY 14:845-851, 1996; and Mendez et al., NATURE GENETICS 15:146-156, 1997. Fully human monoclonal antibodies can also be prepared and optimized from phage display libraries by techniques referenced in, e.g., Knappik et al., J. MOL. BIOL. 296:57-86, 2000; and Krebs et al., J. IMMUNOL. METH. 254:67-84 2001).

[0239] The present invention encompasses fusion proteins comprising antibody fragments, which may be generated by traditional means, such as enzymatic digestion, or by recombinant techniques. For a review of certain antibody fragments, see Hudson et al. (2003) NAT. MED. 9:129-134.

[0240] Various techniques have been developed for the production of antibody fragments. Traditionally, these fragments were derived via proteolytic digestion of intact antibodies (see, e.g., Morimoto et al. (1992) JOURNAL OF BIOCHEMICAL AND BIOPHYSICAL METHODS 24:107-117; and Brennan et al. (1985) SCIENCE 229:81). However, these fragments can now be produced directly by recombinant host cells. Fab, Fv and ScFv antibody fragments can all be expressed in and secreted from E. coli, thus allowing the facile production of large amounts of these fragments. Antibody fragments can be isolated from the antibody phage libraries. Alternatively, Fab′-SH fragments can be directly recovered from E. coli and chemically coupled to form F(ab′)₂ fragments (Carter et al. (1992) BIO/TECHNOLOGY 10:163-167). According to another approach, F(ab')2 fragments can be isolated directly from recombinant host cell culture. Fab and F(ab′)₂ fragments with increased in vivo half-life comprising salvage receptor binding epitope residues are described in U.S. Pat. No. 5,869,046. Other techniques for the production of antibody fragments will be apparent to the skilled practitioner. In certain embodiments, an antibody is a single chain Fv fragment (scFv). See U.S. Pat. Nos. 5,571,894 and 5,587,458.

[0241] Methods for making bispecific antibodies are known in the art. See Milstein and Cuello (1983) NATURE 305:537, International (PCT) Publication No. WO93/08829, and Traunecker et al. (1991) EMBO J., 10:3655. For further details of generating bispecific antibodies see, for example, Suresh et al. (1986) METHODS ENZYMOL. 121:210. Bispecific antibodies include cross-linked or “heteroconjugate” or “heterodimer” antibodies. For example, one of the antibodies in the heterodimer can be coupled to avidin, the other to biotin. Heterodimer antibodies may be made using any convenient cross-linking method. Suitable cross-linking agents are well known in the art, and are disclosed in U.S. Pat. No. 4,676,980, along with a number of cross-linking techniques.

[0242] Examples of heterodimeric or asymmetric IgG-like molecules include but are not limited to those obtained with the following technologies or using the following formats: Triomab/Quadroma, Knobs-into-Holes, CrossMabs, electrostatically-matched antibodies, LUZ-Y, Strand Exchange Engineered Domain body, Biclonic and DuoBody.

[0243] Advantages of using antibody fragments (e.g., F(ab) and F(ab′)₂ fragments) include the elimination of non-specific binding between Fc portions of antibodies and Fc receptors on cells (such as macrophages, dendritic cells, neutrophils, NK cells and B cells). In addition, they may be able to penetrate tissues more efficiently due to their smaller size.

[0244] Heterodimeric antibodies, or asymmetric antibodies, allow for greater flexibility and new formats for attaching a variety of drugs to the antibody arms. One of the general formats for creating a heterodimeric antibody is the “knobs-into-holes” format. This format is specific to the heavy chain part of the constant region in antibodies. The “knobs” part is engineered by replacing a small amino acid with a larger one, which fits into a “hole”, which is engineered by replacing a large amino acid with a smaller one. What connects the “knobs” to the “holes” are the disulfide bonds between each chain. The “knobs-into-holes” shape facilitates antibody dependent cell mediated cytotoxicity. Single chain variable fragments (scFv) are connected to the variable domain of the heavy and light chain via a short linker peptide. The linker is rich in glycine, which gives it more flexibility, and serine/threonine, which gives it specificity. Two different scFv fragments can be connected together, via a hinge region, to the constant domain of the heavy chain or the constant domain of the light chain. This gives the antibody bispecificity, allowing for the binding specificities of two different antigens. The “knobs-into-holes” format enhances heterodimer formation but doesn't suppress homodimer formation.

[0245] Several approaches to support heterodimerization have been described, for example in International (PCT) Publication Nos. WO96/27011, WO98/050431, WO2007/110205, WO2007/147901, WO2009/089004, WO2010/129304, WO2011/90754, WO2011/143545, WO2012/058768, WO2013/157954, and WO2013/096291, and European Patent Publication No. EP1870459. Typically, in the approaches known in the art, the CH₃ domain of the first heavy chain and the CH₃ domain of the second heavy chain are both engineered in a complementary manner so that the heavy chain comprising one engineered CH₃ domain can no longer homodimerize with another heavy chain of the same structure (e.g. a CH₃-engineered first heavy chain can no longer homodimerize with another CH₃-engineered first heavy chain; and a CH₃-engineered second heavy chain can no longer homodimerize with another CH₃-engineered second heavy chain). Thereby the heavy chain comprising one engineered CH₃ domain is forced to heterodimerize with another heavy chain comprising the CH₃ domain, which is engineered in a complementary manner. As a result, the CH₃ domain of the first heavy chain and the CH₃ domain of the second heavy chain are engineered in a complementary manner by amino acid substitutions, such that the first heavy chain and the second heavy chain are forced to heterodimerize, whereas the first heavy chain and the second heavy chain can no longer homodimerize (e.g., for steric reasons).

[0246] IV. Pharmaceutical Compositions

[0247] For therapeutic use, a recombinant human sialidase or a fusion protein and/or antibody conjugate thereof preferably is combined with a pharmaceutically acceptable carrier. The term “pharmaceutically acceptable” as used herein refers to those compounds, materials, compositions, and/or dosage forms which are, within the scope of sound medical judgment, suitable for use in contact with the tissues of human beings and animals without excessive toxicity, irritation, allergic response, or other problem or complication, commensurate with a reasonable benefit/risk ratio.

[0248] The term “pharmaceutically acceptable carrier” as used herein refers to buffers, carriers, and excipients suitable for use in contact with the tissues of human beings and animals without excessive toxicity, irritation, allergic response, or other problem or complication, commensurate with a reasonable benefit/risk ratio. Pharmaceutically acceptable carriers include any of the standard pharmaceutical carriers, such as a phosphate buffered saline solution, water, emulsions (e.g., such as an oil/water or water/oil emulsions), and various types of wetting agents. The compositions also can include stabilizers and preservatives. For examples of carriers, stabilizers and adjuvants, see, e.g., Martin, Remington's Pharmaceutical Sciences, 15th Ed., Mack Publ. Co., Easton, Pa. [1975]. Pharmaceutically acceptable carriers include buffers, solvents, dispersion media, coatings, isotonic and absorption delaying agents, and the like, that are compatible with pharmaceutical administration. The use of such media and agents for pharmaceutically active substances is known in the art.

[0249] In certain embodiments, a pharmaceutical composition may contain formulation materials for modifying, maintaining or preserving, for example, the pH, osmolarity, viscosity, clarity, color, isotonicity, odor, sterility, stability, rate of dissolution or release, adsorption or penetration of the composition. In such embodiments, suitable formulation materials include, but are not limited to, amino acids (such as glycine, glutamine, asparagine, arginine or lysine); antimicrobials; antioxidants (such as ascorbic acid, sodium sulfite or sodium hydrogen-sulfite); buffers (such as borate, bicarbonate, Tris-HCl, citrates, phosphates or other organic acids); bulking agents (such as mannitol or glycine); chelating agents (such as ethylenediamine tetraacetic acid (EDTA)); complexing agents (such as caffeine, polyvinylpyrrolidone, beta-cyclodextrin or hydroxypropyl-beta-cyclodextrin); fillers; monosaccharides; disaccharides; and other carbohydrates (such as glucose, mannose or dextrins); proteins (such as serum albumin, gelatin or immunoglobulins); coloring, flavoring and diluting agents; emulsifying agents; hydrophilic polymers (such as polyvinylpyrrolidone); low molecular weight polypeptides; salt-forming counterions (such as sodium); preservatives (such as benzalkonium chloride, benzoic acid, salicylic acid, thimerosal, phenethyl alcohol, methylparaben, propylparaben, chlorhexidine, sorbic acid or hydrogen peroxide); solvents (such as glycerin, propylene glycol or polyethylene glycol); sugar alcohols (such as mannitol or sorbitol); suspending agents; surfactants or wetting agents (such as pluronics, PEG, sorbitan esters, polysorbates such as polysorbate 20, polysorbate, triton, tromethamine, lecithin, cholesterol, tyloxapal); stability enhancing agents (such as sucrose or sorbitol); tonicity enhancing agents (such as alkali metal halides, preferably sodium or potassium chloride, mannitol sorbitol); delivery vehicles; diluents; excipients and/or pharmaceutical adjuvants (see, Remington's Pharmaceutical Sciences, 18th ed. (Mack Publishing Company, 1990).

[0250] In certain embodiments, a pharmaceutical composition may contain nanoparticles, e.g., polymeric nanoparticles, liposomes, or micelles (See Anselmo et al. (2016) BIOENG. TRANSL. MED. 1: 10-29).

[0251] In certain embodiments, a pharmaceutical composition may contain a sustained- or controlled-delivery formulation. Techniques for formulating sustained- or controlled-delivery means, such as liposome carriers, bio-erodible microparticles or porous beads and depot injections, are also known to those skilled in the art. Sustained-release preparations may include, e.g., porous polymeric microparticles or semipermeable polymer matrices in the form of shaped articles, e.g., films, or microcapsules. Sustained release matrices may include polyesters, hydrogels, polylactides, copolymers of L-glutamic acid and gamma ethyl-L-glutamate, poly (2-hydroxyethyl-inethacrylate), ethylene vinyl acetate, or poly-D(−)-3-hydroxybutyric acid. Sustained release compositions may also include liposomes that can be prepared by any of several methods known in the art.

[0252] Pharmaceutical compositions containing a recombinant human sialidase, a recombinant human sialidase fusion protein, or an antibody conjugate disclosed herein can be presented in a dosage unit form and can be prepared by any suitable method. A pharmaceutical composition should be formulated to be compatible with its intended route of administration. Examples of routes of administration are intravenous (IV), intradermal, inhalation, transdermal, topical, transmucosal, intrathecal and rectal administration. In certain embodiments, a recombinant human sialidase, a recombinant human sialidase fusion protein, or an antibody conjugate disclosed herein is administered by IV infusion. In certain embodiments, a recombinant human sialidase, a recombinant human sialidase fusion protein, or an antibody conjugate disclosed herein is administered by intratumoral injection. Useful formulations can be prepared by methods known in the pharmaceutical art. For example, see Remington's Pharmaceutical Sciences, 18th ed. (Mack Publishing Company, 1990).

[0253] Formulation components suitable for parenteral administration include a sterile diluent such as water for injection, saline solution, fixed oils, polyethylene glycols, glycerin, propylene glycol or other synthetic solvents; antibacterial agents such as benzyl alcohol or methyl parabens; antioxidants such as ascorbic acid or sodium bisulfite; chelating agents such as EDTA; buffers such as acetates, citrates or phosphates; and agents for the adjustment of tonicity such as sodium chloride or dextrose.

[0254] For intravenous administration, suitable carriers include physiological saline, bacteriostatic water, Cremophor ELTM (BASF, Parsippany, NJ) or phosphate buffered saline (PBS). The carrier should be stable under the conditions of manufacture and storage, and should be preserved against microorganisms. The carrier can be a solvent or dispersion medium containing, for example, water, ethanol, polyol (for example, glycerol, propylene glycol, and liquid polyethylene glycol), and suitable mixtures thereof.

[0255] In certain embodiments, a pharmaceutical composition may contain a stabilizing agent. In certain embodiments, the stabilizing agent is a cation, such as a divalent cation. In certain embodiments, the cation is calcium or magnesium. The cation can be in the form of a salt, such as calcium chloride (CaCl₂) or magnesium chloride (MgCl₂).

[0256] In certain embodiments, the stabilizing agent is present in an amount from about 0.05 mM to about 5 mM. For example, the stabilizing agent may be present in an amount of from about 0.05 mM to about 4 mM, from about 0.05 mM to about 3 mM, from about 0.05 mM to about 2 mM, from about 0.05 mM to about 1 mM, from about 0.05 mM to about 0.5 mM, from about 0.5 mM to about 4 mM, from about 0.5 mM to about 3 mM, from about 0.5 mM to about 2 mM, from about 0.5 mM to about 1 mM, from about 1 mM to about 4 mM, from about 1 mM to about 3 mM, of from about 1 mM to about 2 mM.

[0257] Pharmaceutical formulations preferably are sterile. Sterilization can be accomplished by any suitable method, e.g., filtration through sterile filtration membranes. Where the composition is lyophilized, filter sterilization can be conducted prior to or following lyophilization and reconstitution.

[0258] The compositions described herein may be administered locally or systemically. Administration will generally be parenteral administration. In a preferred embodiment, the pharmaceutical composition is administered subcutaneously and in an even more preferred embodiment intravenously. Preparations for parenteral administration include sterile aqueous or non-aqueous solutions, suspensions, and emulsions.

[0259] Generally, a therapeutically effective amount of active component, for example, a recombinant human sialidase or fusion protein and/or antibody conjugate thereof, is in the range of 0.1 mg/kg to 100 mg/kg, e.g., 1 mg/kg to 100 mg/kg, 1 mg/kg to 10 mg/kg. The amount administered will depend on variables such as the type and extent of disease or indication to be treated, the overall health of the patient, the in vivo potency of the antibody, the pharmaceutical formulation, and the route of administration. The initial dosage can be increased beyond the upper level in order to rapidly achieve the desired blood-level or tissue-level. Alternatively, the initial dosage can be smaller than the optimum, and the daily dosage may be progressively increased during the course of treatment. Human dosage can be optimized, e.g., in a conventional Phase I dose escalation study designed to run from 0.5 mg/kg to 20 mg/kg. Dosing frequency can vary, depending on factors such as route of administration, dosage amount, serum half-life of the recombinant human sialidase or fusion protein and/or antibody conjugate thereof, and the disease being treated. Exemplary dosing frequencies are once per day, once per week and once every two weeks. A preferred route of administration is parenteral, e.g., intravenous infusion. In certain embodiments, a recombinant human sialidase or a fusion protein and/or antibody conjugate thereof is lyophilized, and then reconstituted in buffered saline, at the time of administration.

[0260] V. Therapeutic Uses

[0261] The compositions and methods disclosed herein can be used to treat various forms of cancer in a subject or inhibit cancer growth in a subject. The invention provides a method of treating a cancer in a subject. The method comprises administering to the subject an effective amount of a recombinant human sialidase or a fusion protein and/or antibody conjugate thereof, e.g., a recombinant human sialidase, fusion protein, or antibody conjugate disclosed herein, either alone or in a combination with another therapeutic agent to treat the cancer in the subject. The term “effective amount” as used herein refers to the amount of an active agent (e.g., recombinant human sialidase or fusion protein thereof according to the present invention) sufficient to effect beneficial or desired results. An effective amount can be administered in one or more administrations, applications or dosages and is not intended to be limited to a particular formulation or administration route.

[0262] As used herein, “treat”, “treating” and “treatment” mean the treatment of a disease in a subject, e.g., in a human. This includes: (a) inhibiting the disease, i.e., arresting its development; and (b) relieving the disease, i.e., causing regression of the disease state. As used herein, the terms “subject” and “patient” refer to an organism to be treated by the methods and compositions described herein. Such organisms preferably include, but are not limited to, mammals (e.g., murines, simians, equines, bovines, porcines, canines, felines, and the like), and more preferably includes humans.

[0263] Examples of cancers include solid tumors, soft tissue tumors, hematopoietic tumors and metastatic lesions. Examples of hematopoietic tumors include, leukemia, acute leukemia, acute lymphoblastic leukemia (ALL), B-cell, T-cell or FAB ALL, acute myeloid leukemia (AML), chronic myelocytic leukemia (CML), chronic lymphocytic leukemia (CLL), e.g., transformed CLL, diffuse large B-cell lymphomas (DLBCL), follicular lymphoma, hairy cell leukemia, myelodyplastic syndrome (MDS), a lymphoma, Hodgkin's disease, a malignant lymphoma, non-Hodgkin's lymphoma, Burkitt's lymphoma, multiple myeloma, or Richter's Syndrome (Richter's Transformation). Examples of solid tumors include malignancies, e.g., sarcomas, adenocarcinomas, and carcinomas, of the various organ systems, such as those affecting head and neck (including pharynx), thyroid, lung (small cell or non-small cell lung carcinoma (NSCLC)), breast, lymphoid, gastrointestinal (e.g., oral, esophageal, stomach, liver, pancreas, small intestine, colon and rectum, anal canal), genitals and genitourinary tract (e.g., renal, urothelial, bladder, ovarian, uterine, cervical, endometrial, prostate, testicular), CNS (e.g., neural or glial cells, e.g., neuroblastoma or glioma), or skin (e.g., melanoma).

[0264] In certain embodiments the cancer is an epithelial cancer, e.g., an epithelial cancer that upregulates the expression of sialylated glycans. Exemplary epithelial cancers include, but are not limited to, endometrial cancer, colon cancer, ovarian cancer, cervical cancer, vulvar cancer, uterine cancer or fallopian tube cancer, breast cancer, prostate cancer, lung cancer, pancreatic cancer, urinary cancer, bladder cancer, head and neck cancer, oral cancer and liver cancer. Epithelial cancers also include carcinomas, for example, acinar carcinoma, acinous carcinoma, adenocystic carcinoma, adenoid cystic carcinoma, carcinoma adenomatosum, carcinoma of adrenal cortex, alveolar carcinoma, alveolar cell carcinoma, basal cell carcinoma, carcinoma basocellulare, basaloid carcinoma, baso squamous cell carcinoma, bronchioalveolar carcinoma, bronchiolar carcinoma, bronchogenic carcinoma, cerebriform carcinoma, cholangiocellular carcinoma, chorionic carcinoma, colloid carcinoma, comedo carcinoma, corpus carcinoma, cribriform carcinoma, carcinoma en cuirasse, carcinoma cutaneum, cylindrical carcinoma, cylindrical cell carcinoma, duct carcinoma, carcinoma durum, embryonal carcinoma, encephaloid carcinoma, epiermoid carcinoma, carcinoma epitheliale adenoides, exophytic carcinoma, carcinoma ex ulcere, carcinoma fibrosum, gelatiniforni carcinoma, gelatinous carcinoma, giant cell carcinoma, carcinoma gigantocellulare, glandular carcinoma, granulosa cell carcinoma, hair-matrix carcinoma, hematoid carcinoma, hepatocellular carcinoma, Hurthle cell carcinoma, hyaline carcinoma, hypemephroid carcinoma, infantile embryonal carcinoma, carcinoma in situ, intraepidermal carcinoma, intraepithelial carcinoma, Krompecher's carcinoma, Kulchitzky-cell carcinoma, large-cell carcinoma, lenticular carcinoma, carcinoma lenticulare, lipomatous carcinoma, lymphoepithelial carcinoma, carcinoma medullare, medullary carcinoma, melanotic carcinoma, carcinoma molle, mucinous carcinoma, carcinoma muciparum, carcinoma mucocellulare, mucoepidermoid carcinoma, carcinoma mucosum, mucous carcinoma, carcinoma myxomatodes, nasopharyngeal carcinoma, oat cell carcinoma, carcinoma ossifi cans, osteoid carcinoma, papillary carcinoma, periportal carcinoma, preinvasive carcinoma, prickle cell carcinoma, pultaceous carcinoma, renal cell carcinoma of kidney, reserve cell carcinoma, carcinoma sarcomatodes, schneiderian carcinoma, scirrhous carcinoma, carcinoma scroti, signet-ring cell carcinoma, carcinoma simplex, small-cell carcinoma, solanoid carcinoma, spheroidal cell carcinoma, spindle cell carcinoma, carcinoma spongiosum, squamous carcinoma, squamous cell carcinoma, string carcinoma, carcinoma telangiectaticum, carcinoma telangiectodes, transitional cell carcinoma, carcinoma tuberosum, tuberous carcinoma, verrucous carcinoma, and carcinoma villosum.

[0265] In certain embodiments, the cancer is breast cancer. In certain embodiments, the cancer is an adenocarcinoma. In certain embodiments, the cancer is a metastatic cancer. In certain embodiments, the cancer is a refractory cancer.

[0266] In certain embodiments, the cancer is resistant to or non-responsive to treatment with an antibody, e.g., an antibody with ADCC activity, e.g., trastuzumab.

[0267] The methods and compositions described herein can be used alone or in combination with other therapeutic agents and/or modalities. The term administered “in combination,” as used herein, is understood to mean that two (or more) different treatments are delivered to the subject during the course of the subject's affliction with the disorder, such that the effects of the treatments on the patient overlap at a point in time. In certain embodiments, the delivery of one treatment is still occurring when the delivery of the second begins, so that there is overlap in terms of administration. This is sometimes referred to herein as “simultaneous” or “concurrent delivery.” In other embodiments, the delivery of one treatment ends before the delivery of the other treatment begins. In certain embodiments of either case, the treatment is more effective because of combined administration. For example, the second treatment is more effective, e.g., an equivalent effect is seen with less of the second treatment, or the second treatment reduces symptoms to a greater extent, than would be seen if the second treatment were administered in the absence of the first treatment, or the analogous situation is seen with the first treatment. In certain embodiments, delivery is such that the reduction in a symptom, or other parameter related to the disorder is greater than what would be observed with one treatment delivered in the absence of the other. The effect of the two treatments can be partially additive, wholly additive, or greater than additive. The delivery can be such that an effect of the first treatment delivered is still detectable when the second is delivered.

[0268] In certain embodiments, a method or composition described herein, is administered in combination with one or more additional therapies, e.g., surgery, radiation therapy, or administration of another therapeutic preparation. In certain embodiments, the additional therapy may include chemotherapy, e.g., a cytotoxic agent. In certain embodiments the additional therapy may include a targeted therapy, e.g. a tyrosine kinase inhibitor, a proteasome inhibitor, or a protease inhibitor. In certain embodiments, the additional therapy may include an anti-inflammatory, anti-angiogenic, anti-fibrotic, or anti-proliferative compound, e.g., a steroid, a biologic immunomodulator, a monoclonal antibody, an antibody fragment, an aptamer, an siRNA, an antisense molecule, a fusion protein, a cytokine, a cytokine receptor, a bronchodialator, a statin, an anti-inflammatory agent (e.g. methotrexate), or an NSAID. In certain embodiments, the additional therapy may include a combination of therapeutics of different classes.

[0269] In certain embodiments, a method or composition described herein is administered in combination with a checkpoint inhibitor. The checkpoint inhibitor may, for example, be selected from a PD-1 antagonist, PD-L1 antagonist, CTLA-4 antagonist, adenosine A2A receptor antagonist, B7-H3 antagonist, B7-H4 antagonist, BTLA antagonist, KIR antagonist, LAG3 antagonist, TIM-3 antagonist, VISTA antagonist or TIGIT antagonist.

[0270] In certain embodiments, the checkpoint inhibitor is a PD-1 or PD-L1 inhibitor. PD-1 is a receptor present on the surface of T-cells that serves as an immune system checkpoint that inhibits or otherwise modulates T-cell activity at the appropriate time to prevent an overactive immune response. Cancer cells, however, can take advantage of this checkpoint by expressing ligands, for example, PD-L1, that interact with PD-1 on the surface of T-cells to shut down or modulate T-cell activity. Exemplary PD-1/PD-L1 based immune checkpoint inhibitors include antibody based therapeutics. Exemplary treatment methods that employ PD-1/PD-L1 based immune checkpoint inhibition are described in U.S. Pat. Nos. 8,728,474 and 9,073,994, and EP Patent No. 1537878B1, and, for example, include the use of anti-PD-1 antibodies. Exemplary anti-PD-1 antibodies are described, for example, in U.S. Pat. Nos. 8,952,136, 8,779,105, 8,008,449, 8,741,295, 9,205,148, 9,181,342, 9,102,728, 9,102,727, 8,952,136, 8,927,697, 8,900,587, 8,735,553, and 7,488,802. Exemplary anti-PD-1 antibodies include, for example, nivolumab (Opdivo®, Bristol-Myers Squibb Co.), pembrolizumab (Keytruda®, Merck Sharp & Dohme Corp.), PDR001 (Novartis Pharmaceuticals), and pidilizumab (CT-011, Cure Tech). Exemplary anti-PD-L1 antibodies are described, for example, in U.S. Pat. Nos. 9,273,135, 7,943,743, 9,175,082, 8,741,295, 8,552,154, and 8,217,149. Exemplary anti-PD-L1 antibodies include, for example, atezolizumab (Tecentriq®, Genentech), durvalumab (AstraZeneca), MEDI4736, avelumab, and BMS 936559 (Bristol Myers Squibb Co.).

[0271] In certain embodiments, a method or composition described herein is administered in combination with a CTLA-4 inhibitor. In the CTLA-4 pathway, the interaction of CTLA-4 on a T-cell with its ligands (e.g., CD80, also known as B7-1, and CD86) on the surface of an antigen presenting cells (rather than cancer cells) leads to T-cell inhibition. Exemplary CTLA-4 based immune checkpoint inhibition methods are described in U.S. Pat. Nos. 5,811,097, 5,855,887, 6,051,227. Exemplary anti-CTLA-4 antibodies are described in U.S. Pat. Nos. 6,984,720, 6,682,736, 7,311,910; 7,307,064, 7,109,003, 7,132,281, 6,207,156, 7,807,797, 7,824,679, 8,143,379, 8,263,073, 8,318,916, 8,017,114, 8,784,815, and 8,883,984, International (PCT) Publication Nos. WO98/42752, WO00/37504, and WO01/14424, and European Patent No. EP 1212422 B1. Exemplary CTLA-4 antibodies include ipilimumab or tremelimumab.

[0272] In certain embodiments, a method or composition described herein is administered in combination with (i) a PD-1 or PD-L1 inhibitor, e.g., a PD-1 or PD-L1 inhibitor disclosed herein, and (ii) CTLA-4 inhibitor, e.g., a CTLA-4 inhibitor disclosed herein.

[0273] In certain embodiments, a method or composition described herein is administered in combination with an IDO inhibitor. Exemplary IDO inhibitors include 1-methyl-D-tryptophan (known as indoximod), epacadostat (INCB24360), navoximod (GDC-0919), and BMS-986205.

[0274] Exemplary cytotoxic agents that can be administered in combination with a method or composition described herein include, for example, antimicrotubule agents, topoisomerase inhibitors, antimetabolites, protein synthesis and degradation inhibitors, mitotic inhibitors, alkylating agents, platinating agents, inhibitors of nucleic acid synthesis, histone deacetylase inhibitors (HDAC inhibitors, e.g., vorinostat (SAHA, MK0683), entinostat (MS-275), panobinostat (LBH589), trichostatin A (TSA), mocetinostat (MGCD0103), belinostat (PXD101), romidepsin (FK228, depsipeptide)), DNA methyltransferase inhibitors, nitrogen mustards, nitrosoureas, ethylenimines, alkyl sulfonates, triazenes, folate analogs, nucleoside analogs, ribonucleotide reductase inhibitors, vinca alkaloids, taxanes, epothilones, intercalating agents, agents capable of interfering with a signal transduction pathway, agents that promote apoptosis and radiation, or antibody molecule conjugates that bind surface proteins to deliver a toxic agent. In one embodiment, the cytotoxic agent that can be administered with a method or composition described herein is a platinum-based agent (such as cisplatin), cyclophosphamide, dacarbazine, methotrexate, fluorouracil, gemcitabine, capecitabine, hydroxyurea, topotecan, irinotecan, azacytidine, vorinostat, ixabepilone, bortezomib, taxanes (e.g., paclitaxel or docetaxel), cytochalasin B, gramicidin D, ethidium bromide, emetine, mitomycin, etoposide, tenoposide, vincristine, vinblastine, vinorelbine, colchicin, anthracyclines (e.g., doxorubicin or epirubicin) daunorubicin, dihydroxy anthracin dione, mitoxantrone, mithramycin, actinomycin D, adriamycin, 1-dehydrotestosterone, glucocorticoids, procaine, tetracaine, lidocaine, propranolol, puromycin, ricin, or maytansinoids.

[0275] The invention also provides a method of increasing the expression of HLA-DR, CD86, CD83, IFNγ, IL-1b, IL-6, TNFα, IL-17A, IL-2, or IL-6 in a cell, tissue, or subject. The method comprises contacting the cell, tissue, or subject with an effective amount of a sialidase, fusion protein and/or antibody conjugate, e.g., a sialidase, a fusion protein or antibody conjugate disclosed herein. In certain embodiments, the cell is selected from a dendritic cell and a peripheral blood mononuclear cell (PBMC).

[0276] In certain embodiments, expression of HLA-DR, CD86, CD83, IFNγ, IL-1b, IL-6, TNFα, IL-17A, IL-2, or IL-6 in the cell, tissue, or subject is increased by at least about 10%, at least about 20%, at least about 50%, at least about 75%, at least about 100%, at least about 150%, at least about 200%, at least about 250%, at least about 300%, at least about 400%, at least about 500%, at least about 600%, at least about 700%, at least about 800%, at least about 900%, or at least about 1,000%, relative to a similar or otherwise identical cell or tissue that has not been contacted with the sialidase, fusion protein, or antibody conjugate. Gene expression may be measured by any suitable method known in the art, for example, by ELISA, or by Luminex multiplex assays.

[0277] The invention also provides a method of promoting infiltration of immune cells into a tumor in a subject in need thereof. The method comprises administering to the subject an effective amount of a sialidase, fusion protein, and/or antibody conjugate, e.g., a sialidase, fusion protein, or antibody conjugate disclosed herein. In certain embodiments, the immune cells are T-cells, e.g., CD4+ and/or CD8+ T-cells, e.g., CD69⁺ CD8⁺ and/or GzmB⁺CD8⁺ T-cells. In certain embodiments, the immune cells are natural killer (NK) cells.

[0278] In certain embodiments, the infiltration of immune cells into the tumor in the subject is increased by at least about 10%, at least about 20%, at least about 50%, at least about 75%, at least about 100%, at least about 150%, at least about 200%, at least about 250%, at least about 300%, at least about 400%, at least about 500%, at least about 600%, at least about 700%, at least about 800%, at least about 900%, or at least about 1,000%, relative to a similar or otherwise identical tumor and/or subject that has not been administered the sialidase, fusion protein, or antibody conjugate. Infiltration of immune cells into a tumor may be measured by any suitable method known in the art, for example, antibody staining.

[0279] The invention also provides a method of increasing the number of circulating natural killer (NK) cells in a subject in need thereof. The method comprises administering to the subject an effective amount of a sialidase, fusion protein, and/or antibody conjugate, e.g., a sialidase, fusion protein, or antibody conjugate disclosed herein, so as to increase the number of circulating NK cells relative to prior to administration of the sialidase, fusion protein, or antibody conjugate.

[0280] In certain embodiments, the number of circulating NK cells in the subject is increased by at least about 10%, at least about 20%, at least about 50%, at least about 75%, at least about 100%, at least about 150%, at least about 200%, at least about 250%, at least about 300%, at least about 400%, at least about 500%, at least about 600%, at least about 700%, at least about 800%, at least about 900%, or at least about 1,000%, relative to a similar or otherwise identical subject that has not been administered the sialidase, fusion protein, or antibody conjugate. Circulating NK cells in a subject may be measured by any suitable method known in the art, for example, antibody staining.

[0281] The invention also provides a method of increasing the number of T-cells in the draining lymph node in a subject in need thereof. The method comprises administering to the subject an effective amount of a sialidase, fusion protein, and/or antibody conjugate, e.g., a sialidase, fusion protein, or antibody conjugate disclosed herein, so as to increase the number of T-cells in the draining lymph node relative to prior to administration of the fusion protein, antibody conjugate or pharmaceutical composition. In certain embodiments, the immune cells are T-cells, e.g., CD4+ and/or CD8+ T-cells.

[0282] In certain embodiments, the number of T-cells in the draining lymph node in the subject is increased by at least about 10%, at least about 20%, at least about 50%, at least about 75%, at least about 100%, at least about 150%, at least about 200%, at least about 250%, at least about 300%, at least about 400%, at least about 500%, at least about 600%, at least about 700%, at least about 800%, at least about 900%, or at least about 1,000%, relative to a similar or otherwise identical subject that has not been administered the sialidase, fusion protein, or antibody conjugate. T-cells in the draining lymph node in a subject may be measured by any suitable method known in the art, for example, antibody.

[0283] The invention also provides a method of increasing expression of Cd3, Cd4, Cd8, Cd274, Ctla4, Icos, Pdcd1, Lag3, 116, Ib, I12, Ifng, Ifna1, Mx1, Gzmb, Cxcl9, Cxcl12, and/or Cc15 in a cell, tissue, or subject. The method comprises contacting the cell, tissue, or subject with an effective amount of a sialidase, fusion protein, and/or antibody conjugate, e.g., a sialidase, fusion protein, or antibody conjugate disclosed herein, so as to increase the expression of Cd3, Cd4, Cd8, Cd274, Ctla4, Icos, Pdcd1, Lag3, 116, I11b, I12, Ifng, Ifna1, Mx1, Gzmb, Cxcl9, Cxcl12, and/or Cc15 relative to the cell, tissue or subject prior to contact with the sialidase, fusion protein, or antibody conjugate.

[0284] In certain embodiments, expression of Cd3, Cd4, Cd8, Cd274, Ctla4, Icos, Pdcdl, Lag3, 116, I11b, 112, Ifng, Ifna1, Mx1, Gzmb, Cxcl9, Cxcl12, and/or Cc15 in the cell, tissue, or subject is increased by at least about 10%, at least about 20%, at least about 50%, at least about 75%, at least about 100%, at least about 150%, at least about 200%, at least about 250%, at least about 300%, at least about 400%, at least about 500%, at least about 600%, at least about 700%, at least about 800%, at least about 900%, or at least about 1,000%, relative to a similar or otherwise identical cell, tissue, or subject that has not been contacted with the sialidase, fusion protein, or antibody conjugate. Gene expression may be measured by any suitable method known in the art, for example, by ELISA, Luminex multiplex assays, or Nanostring technology.

[0285] The invention also provides a method of removing sialic acid from a cell or tissue. The method comprises contacting the cell or tissue with an effective amount of a sialidase, fusion protein, and/or antibody conjugate, e.g., a sialidase, fusion protein, or antibody conjugate disclosed herein. The invention also provides a method of removing sialic acid from a cell in a subject, the method comprising administering to the subject an effective amount of a pharmaceutical composition comprising a sialidase, fusion protein, and/or antibody conjugate, e.g., a sialidase, fusion protein, or antibody conjugate disclosed herein, thereby to remove sialic acid from the cell.

[0286] In certain embodiments, the cell is tumor cell, dendritic cell (DC) or monocyte. In certain embodiments, the cell is a monocyte, and the method results in increased expression of an MHC-II molecule (e.g., HLA-DR) on the monocyte. In certain embodiments, expression of an MHC-II molecule in the cell or tissue is increased by at least about 10%, at least about 20%, at least about 50%, at least about 75%, at least about 100%, at least about 150%, at least about 200%, at least about 250%, at least about 300%, at least about 400%, at least about 500%, at least about 600%, at least about 700%, at least about 800%, at least about 900%, or at least about 1,000%, relative to a similar or otherwise identical cell or tissue that has not been contacted with the sialidase, fusion protein, and/or antibody conjugate. Gene expression may be measured by any suitable method known in the art, for example, by ELISA, by Luminex multiplex assays, or by flow cytometry.

[0287] The invention also provides a method of enhancing phagocytosis of a tumor cell. The method comprises contacting the tumor cell with a sialidase, fusion protein, and/or antibody conjugate, e.g., a sialidase, fusion protein, or antibody conjugate disclosed herein, in an amount effective to remove sialic acid from the tumor cell, thereby enhancing phagocytosis of the tumor cell. In certain embodiments, the disclosure relates to a method of increasing phagocytosis of a tumor cell in a subject, the method comprising administering to the subject an effective amount of a pharmaceutical composition a sialidase, fusion protein, and/or antibody conjugate, e.g., a sialidase, fusion protein or antibody conjugate disclosed herein, in an amount effective to remove sialic acid from the tumor cell, thereby to increase phagocytosis of the tumor cell.

[0288] In certain embodiments, phagocytosis is increased by at least about 10%, at least about 20%, at least about 50%, at least about 75%, at least about 100%, at least about 150%, at least about 200%, at least about 250%, at least about 300%, at least about 400%, at least about 500%, at least about 600%, at least about 700%, at least about 800%, at least about 900%, or at least about 1,000%, relative to a similar or otherwise identical tumor cell or population of tumor cells that has not or have not been contacted with the sialidase, fusion protein, and/or antibody conjugate. Phagocytosis may be measured by any suitable method known in the art.

[0289] The invention also provides a method of activating a dendritic cell (DC). The method comprises contacting the DC with a tumor cell that has been treated with a sialidase, fusion protein, and/or antibody conjugate, e.g., a sialidase, fusion protein, or antibody conjugate disclosed herein. In certain embodiments, the disclosure relates to a method of activating a dendritic cell (DC) or a population of DCs in a subject, the method comprising administering to the subject an amount of a pharmaceutical composition comprising a sialidase, fusion protein, and/or antibody conjugate, e.g., a sialidase, fusion protein, or antibody conjugate disclosed herein, effective to remove sialic acid from a tumor cell in the subject, thereby to activate the DC or the population of DCs in the subject.

[0290] In certain embodiments, activation of the DC or a population of DCs is increased by at least about 10%, at least about 20%, at least about 50%, at least about 75%, at least about 100%, at least about 150%, at least about 200%, at least about 250%, at least about 300%, at least about 400%, at least about 500%, at least about 600%, at least about 700%, at least about 800%, at least about 900%, or at least about 1,000%, relative to a similar or otherwise identical DC or population of DCs that has not or have not been contacted with a tumor cell that has been treated with the sialidase, fusion protein, and/or antibody conjugate. Activation may be measured by any suitable method known in the art.

[0291] The invention also provides a method of reducing Siglec-15 binding activity, thereby to increase anti-tumor activity in a tumor microenvironment, the method comprising contacting a T cell with a sialidase, fusion protein, and/or antibody conjugate, e.g., a sialidase, fusion protein, or antibody conjugate disclosed herein. In certain embodiments, the disclosure relates to a method of reducing Siglec-15 binding activity, thereby to increase anti-tumor activity in a tumor microenvironment of a patient, the method comprising administering to the subject an effective amount of a pharmaceutical composition comprising a sialidase, fusion protein, and/or antibody conjugate, e.g., a sialidase, fusion protein, or antibody conjugate disclosed herein, thereby to increase anti-tumor activity (e.g., T cell activity) in the subject.

[0292] In certain embodiments, Siglec-15 binding activity is reduced by at least about 10%, at least about 20%, at least about 50%, at least about 75%, or about 100%, relative to Siglec-15 that has not or have not been contacted with the sialidase, fusion protein, and/or antibody conjugate. Binding may be measured by any suitable method known in the art.

[0293] Throughout the description, where compositions are described as having, including, or comprising specific components, or where processes and methods are described as having, including, or comprising specific steps, it is contemplated that, additionally, there are compositions of the present invention that consist essentially of, or consist of, the recited components, and that there are processes and methods according to the present invention that consist essentially of, or consist of, the recited processing steps.

[0294] In the application, where an element or component is said to be included in and/or selected from a list of recited elements or components, it should be understood that the element or component can be any one of the recited elements or components, or the element or component can be selected from a group consisting of two or more of the recited elements or components.

[0295] Further, it should be understood that elements and/or features of a composition or a method described herein can be combined in a variety of ways without departing from the spirit and scope of the present invention, whether explicit or implicit herein. For example, where reference is made to a particular compound, that compound can be used in various embodiments of compositions of the present invention and/or in methods of the present invention, unless otherwise understood from the context. In other words, within this application, embodiments have been described and depicted in a way that enables a clear and concise application to be written and drawn, but it is intended and will be appreciated that embodiments may be variously combined or separated without parting from the present teachings and invention(s). For example, it will be appreciated that all features described and depicted herein can be applicable to all aspects of the invention(s) described and depicted herein.

[0296] It should be understood that the expression “at least one of” includes individually each of the recited objects after the expression and the various combinations of two or more of the recited objects unless otherwise understood from the context and use. The expression “and/or” in connection with three or more recited objects should be understood to have the same meaning unless otherwise understood from the context.

[0297] The use of the term “include,” “includes,” “including,” “have,” “has,” “having,” “contain,” “contains,” or “containing,” including grammatical equivalents thereof, should be understood generally as open-ended and non-limiting, for example, not excluding additional unrecited elements or steps, unless otherwise specifically stated or understood from the context.

[0298] Where the use of the term “about” is before a quantitative value, the present invention also includes the specific quantitative value itself, unless specifically stated otherwise. As used herein, the term “about” refers to a ±10% variation from the nominal value unless otherwise indicated or inferred.

[0299] It should be understood that the order of steps or order for performing certain actions is immaterial so long as the present invention remain operable. Moreover, two or more steps or actions may be conducted simultaneously.

[0300] The use of any and all examples, or exemplary language herein, for example, “such as” or “including,” is intended merely to illustrate better the present invention and does not pose a limitation on the scope of the invention unless claimed. No language in the specification should be construed as indicating any non-claimed element as essential to the practice of the present invention.

### EXAMPLES

[0301] The following Examples are merely illustrative and are not intended to limit the scope or content of the invention in any way.

### Example 1

[0302] This example describes the construction of recombinant human sialidases (Neu1, Neu2, and Neu3).

[0303] The human sialidases Neu1, Neu2, Neu3 (isoform 1), and Neu4 (isoform 1) were expressed as secreted proteins with a 10× His tag. To express Neu1 as a secreted protein, the native N terminal signal peptide (MTGERPSTALPDRRWGPRILGFWGGCRVWVFAAIFLLLSLAASWSKA; SEQ ID NO: 27) was replaced by MDMRVPAQLLGLLLLWLPGARC (SEQ ID NO: 28), and the C terminal lysosomal signal motif (YGTL; SEQ ID NO: 29) was removed. To express Neu2, Neu3, and Neu4 as secreted proteins, the N terminal signal peptide MDMRVPAQLLGLLLLWLPGARC (SEQ ID NO: 28) was added to each.

[0304] Sialidases were expressed in a 200 mL transfection of HEK293F human cells in 24-well plates using the pCEP4 mammalian expression vector with an N-terminal 6× His tag. Sialidases were purified using Ni-NTA columns, quantified with a UV-Vis spectrophotometer (NanoDrop), and examined by SDS-PAGE as shown in FIG. 1. Neu1 expressed well, with a yield of ˜3 μg/ml, and was present primarily in a monomeric form. Neu2 and Neu3 expression each gave yields of ˜0.15 μg/mL and each were present primarily in a dimeric form. Neu4 had no detectable expression yield as measured by NanoDrop. Bacterial sialidase from Salmonella typhimurium (St-sialidase; SEQ ID NO: 30), which was used as a positive control for expression, gave a comparable yield to Neu1, and was present primarily in a monomeric form.

[0305] The activity of the recombinantly expressed sialidases was assayed by measuring the release of sialic acid from the fluorogenic substrate 4-methylumbelliferyl-N-acetylneuraminic acid (4MU-NeuAc). As shown in FIG. 2, Neu1 has no detectable activity above a no-enzyme control, which is consistent with previous reports indicating that Neu1 is inactive unless it is in complex with beta-galactosidase and protective protein/cathepsin A (PPCA). Neu2 and Neu3 were active. An enzyme kinetics assay was performed with Neu2 and Neu3. A fixed concentration of enzyme at 1 nM was incubated with fluorogenic substrate 4MU-NeuAc at concentrations ranging from 4000 μM to 7.8 μM. Assays were conducted at both acidic (pH 5.6) and neutral (pH 7) conditions. As shown in FIG. 3, both Neu2 and Neu3 were active at acidic and neutral conditions and showed enzyme kinetics that were comparable to those previously reported.

[0306] Most of the recombinantly expressed sialidases ran as aggregates or dimers on a non-reducing SDS-PAGE gel. Subsequent treatment with the reducing agent dithiothreitol (DTT) resulted in a monomeric form of the enzyme that ran at 42 kDa on a reducing SDS-PAGE gel (FIG. 1).

### Example 2

[0307] This example describes the construction of recombinant human sialidases with mutations that increase expression and/or activity of the sialidase.

### A. Rational Design

[0308] Structural and sequence analysis identified residues A93 and P62 of Neu2 as candidates for substitutions to increase solubility and/or expression. In particular, a comparison of homologous sialidase sequences showed a preference for D or E amino acid residues at positions corresponding to position 93 of Neu2, and a preference for G amino acid residues at positions corresponding to position 62 of Neu2.

[0309] The beta-propeller family of proteins are usually stabilized by extensive hydrogen bonding interactions at the N- and C-termini of the protein. A structural analysis revealed that Neu2, which is a member of the beta-propeller family, appears to lack these stabilizing interactions. In contrast, sialidases from Salmonella typhimurium and Micromonospora viridifaciens (the bacterial sialidase most homologous to human Neu2) have extensive hydrogen bonding interactions at their N- and C-termini. Accordingly, residues K9, V363, and L365 of Neu2 were mutated to promote hydrogen bonding between the N- and C-termini of Neu2.

### B. Phage Display

[0310] Neu2 was expressed in a phage display system allowing for screening of Neu2 variants for both expression level and resistance to heat denaturation. Neu2 with V6Y and I187K substitutions was used as a template for library preparation. Designed phage display libraries 1, 2, and 3 are depicted in TABLEs 11-13, respectively. Each library included all of the possible combinations of the mutations depicted. A fourth library included random mutations generated by error prone PCR.

TABLE 11
Phage Library 1

| Wild- | | | |
|---|---|---|---|
| Type | | | |
| Neu2 | | Substituting | |
| Amino | | Amino | Codon |
| Acid(s) | Design | Acids | Usage |
| 184-188 | Adjust length of 5 wild-type | S, N, R, K, T, G, | RVM |
| LHPIQ | residues from 2 to 5 and | D, E, A | |
| | substitute each residue with | | |
| | one of 9 polar amino acids | | |
| P190, | Substitute with one of 5 non- | F, I, L, M, V | NTK |
| I191 | polar amino acids | | |
| C219 | Substitute with one of 12 polar | R, N, D, C, G, | NDT |
| | or nonpolar amino acids | H, I, L, F, S, Y, | |
| | | V | |
| L217 | Substitute with one of 12 polar | R, N, D, C, G, | NDT |
| | or nonpolar amino acids | H, I, L, F, S, Y, | |
| | | V | |
| T216 and | Insert one of 12 polar or | S, T, Y, L, F, A, | NHT |
| L217 | nonpolar amino acids between | P, V, I, N, D, H | |
| | the wild-type amino acids | | |
| G271 | Substitute with one of 9 polar | S, N, R, K, T, G, | RVM |
| | amino acids | D, E, A | |
| C272 | Substitute with one of 9 polar | S, N, R, K, T, G, | RVM |
| | amino acids | D, E, A | |

TABLE 12
Phage Library 2

| Wild-Type | | | |
|---|---|---|---|
| Neu2 | | Substituting | |
| Amino | | Amino | Codon |
| Acid(s) | Design | Acids | Usage |
| 156-165 | Substitute with one of 12 | R, N, D, C, G, H, | NDT |
| TFAVGPGHCL | hydrophobic or polar | I, L, F, S, Y, V | |
| | amino acids | | |
| V176 | Substitute with one of 12 | R, N, D, C, G, H, | NDT |
| | hydrophobic or polar | I, L, F, S, Y, V | |
| | amino acids | | |
| P177 | Substitute with one of 12 | S, T, Y, L, F, A, | NHT |
| | hydrophobic or polar | P, V, I, N, D, H | |
| | amino acids | | |
| A178 | Substitute with one of 12 | S, T, Y, L, F, A, | NHT |
| | hydrophobic or polar | P, V, I, N, D, H | |
| | amino acids | | |
| A194 | Substitute with one of 12 | S, T, Y, L, F, A, | NHT |
| | hydrophobic or polar | P, V, I, N, D, H | |
| | amino acids | | |

TABLE 13
Phage Library 3

| Wild-Type | | | |
|---|---|---|---|
| Neu2 | | | |
| Amino | | Substituting | Codon |
| Acid(s) | Design | Amino Acids | Usage |
| F13 | Substitute with one of 9 polar | S, N, R, K, T, G, | RMV |
| | amino acids chain AAs | D, E, A | |
| L4 | Substitute with one of 12 | S, T, Y, L, F, A, | NHT |
| | hydrophobic or polar amino | P, V, I, N, D, H | |
| | acids | | |
| L7, V12 | Substitute with one of 6 polar | F, Y, S, I, T, N | WHT |
| | or aromatic amino acids | | |
| I22, A24 | Substitute with one of 9 polar | S, N, R, K, T, G, | RMV |
| | amino acids | D, E, A | |
| V325, L326, | Substitute with one of 6 polar | F, Y, S, I, T, N | WHT |
| and L327 | or aromatic amino acids | | |
| L365 | Substitute with one of 6 polar | F, Y, S, I, T, N | WHT |
| | or aromatic amino acids | | |
| P89 | Substitute with one of 5 non- | F, I, L, M, V | NTK |
| | polar amino acids | | |
| L34, A36, | Substitute with one of 12 | S, T, Y, L, F, A, | NHT |
| and V363 | hydrophobic or polar amino | P, V, I, N, D, H | |
| | acids | | |

[0311] The codon usage columns in TABLES 11-13 represent degenerate codon codes used in the design of the library, where the first, second, and third positions of a given codon encoding an amino acid are as shown in TABLE 14 and as described in Mena et al. (2005) PROTEIN ENG DES SEL. 18(12):559-61.

TABLE 14

| Degenerate Codon Code | Mixed bases |
|---|---|
| R | A, G |
| Y | C, T/U |
| M | A, C |
| K | G, T/U |
| S | G, C |
| W | A, T |
| H | A, C, T/U |
| B | G, C, T |
| | (or U) |
| V | A, C, G |
| D | A, G, T/U |
| N | A, C, G, T/U |

[0312] The phage display libraries were screened for binding to a conformation-specific antibody and/or a sialic acid biotinylated probe after heating to enrich for thermal stability and expression. The sialic acid biotinylated probe and its synthesis is depicted in FIG. 4. An exemplary phage display screening procedure is depicted in FIG. 5. Briefly, phage libraries expressing the desired Neu2 variants were generated. Phage were screened for binding to immobilized anti-Neu2 antibody and/or sialic acid biotinylated probe. Following washing to remove unbound phage, bound phage were eluted from the antibody or probe and analyzed as appropriate.

### C. Yeast Display

[0313] Neu2 was also expressed in a yeast display system allowing for screening of Neu2 variants for both expression level and resistance to heat denaturation. Neu2 with V6Y and I187K substitutions was used as a template for library preparation. Designed yeast display libraries 1a, 1b, 1c, 1d, 2a, 2b, 2c, 3a, 3b, and 3c are depicted in TABLEs 15-24, respectively. Each library included all of the possible combinations of the mutations depicted. Five additional sublibraries were generated by error prone PCR, at an approximate average rate of 1, 2, 3, 4, and 5 substitutions per enzyme.

TABLE 15
Yeast Library 1a

| Wild-Type Neu2 | | Codon |
|---|---|---|
| Amino Acid(s) | Substituting Amino Acids | Usage |
| L184 | All | NNK |
| H185 | All | NNK |
| P186 | None (Wild-type) | |
| K187 | None (Wild-type) | |
| Q188 | None (Wild-type) | |
| P190 | A, D, G, H, I, L, N, P, R, S, T, V | VNT |
| I191 | A, D, F, H, I, L, N, P, S, T, V, Y | NHT |
| C219 | None (Wild-type) | |
| G271 | All | NNK |
| C272 | All | NNK |

Total Diversity: 2.30E+07

TABLE 16
Yeast Library 1b

| Wild-Type Neu2 | | Codon |
|---|---|---|
| Amino Acid(s) | Substituting Amino Acids | Usage |
| L184 | A, D, F, H, I, L, N, P, S, T, V, Y | NHT |
| H185 | All | NNK |
| P186 | A, D, F, H, I, L, N, P, S, T, V, Y | NHT |
| K187 | None (Wild-type) | |
| Q188 | None (Wild-type) | |
| P190 | A, D, G, H, I, L, N, P, R, S, T, V | VNT |
| I191 | A, D, F, H, I, L, N, P, S, T, V, Y | NHT |
| C219 | None (Wild-type) | |
| G271 | A, D, E, G, K, N, R, S, T | RVM |
| C272 | A, C, D, G, H, N, P, R, S, T | NVT |

Total Diversity: 4.11E+07

TABLE 17
Yeast Library 1c

| Wild-Type Neu2 | | Codon |
|---|---|---|
| Amino Acid(s) | Substituting Amino Acids | Usage |
| L184 | A, D, F, H, I, L, N, P, S, T, V, Y | NHT |
| H185 | A, D, E, G, K, N, R, S, T | RVM |
| P186 | A, D, F, H, I, L, N, P, S, T, V, Y | NHT |
| K187 | A, D, E, G, K, N, R, S, T | RVM |
| Q188 | None (Wild-type) | |
| P190 | F, L, I, V | NTT |
| I191 | A, D, F, H, I, L, N, P, S, T, V, Y | NHT |
| C219 | None (Wild-type) | |
| G271 | A, D, E, G, K, N, R, S, T | RVM |
| C272 | A, D, F, H, L, P, S, V, Y | BHT |

Total Diversity: 4.53E+07

TABLE 18
Yeast Library 1d

| Wild-Type Neu2 | | Codon |
|---|---|---|
| Amino Acid(s) | Substituting Amino Acids | Usage |
| L184 | A, D, F, H, L, P, S, V, Y | BHT |
| H185 | A, D, E, G, K, N, R, S, T | RVM |
| P186 | A, D, F, H, L, P, S, V, Y | BHT |
| K187 | A, D, E, G, K, N, R, S, T | RVM |
| Q188 | A, D, F, H, L, P, S, V, Y | BHT |
| P190 | None (Wild-type) | |
| I191 | A, D, E, G, K, N, R, S, T | RVM |
| C219 | None (Wild-type) | |
| G271 | A, D, E, G, K, N, R, S, T | RVM |
| C272 | A, D, F, H, L, P, S, V, Y | BHT |

Total Diversity: 4.30E+07

TABLE 19
Yeast Library 2a

| Wild-Type Neu2 | | Codon |
|---|---|---|
| Amino Acid(s) | Substituting Amino Acids | Usage |
| T156 | R, N, D, C, G, H, I, L, F, S, Y, V | NDT |
| F157 | None (Wild-type) | |
| A158 | R, N, D, C, G, H, I, L, F, S, Y, V | NDT |
| V159 | None (Wild-type) | |
| G160 | R, N, D, C, G, H, I, L, F, S, Y, V | NDT |
| P161 | None (Wild-type) | |
| G162 | R, N, D, C, G, H, I, L, F, S, Y, V | NDT |
| H163 | None (Wild-type) | |
| C164 | R, N, D, C, G, H, I, L, F, S, Y, V | NDT |
| L165 | None (Wild-type) | |
| V176 | L, V, P, A, H, D | SHT |
| P177 | L, V, P, A, H, D | SHT |
| A178 | L, V, P, A, H, D | SHT |
| A194 | L, V, P, A, H, D | SHT |

Total Diversity: 3.22E+08

TABLE 20
Yeast Library 2b

| Wild-Type Neu2 | | Codon |
|---|---|---|
| Amino Acid(s) | Substituting Amino Acids | Usage |
| T156 | None (Wild-type) | |
| F157 | R, N, D, C, G, H, I, L, F, S, Y, V | NDT |
| A158 | None (Wild-type) | |
| V159 | R, N, D, C, G, H, I, L, F, S, Y, V | NDT |
| G160 | None (Wild-type) | |
| P161 | R, N, D, C, G, H, I, L, F, S, Y, V | NDT |
| G162 | None (Wild-type) | |
| H163 | R, N, D, C, G, H, I, L, F, S, Y, V | NDT |
| C164 | None (Wild-type) | |
| L165 | R, N, D, C, G, H, I, L, F, S, Y, V | NDT |
| V176 | L, V, P, A, H, D | SHT |
| P177 | L, V, P, A, H, D | SHT |
| A178 | L, V, P, A, H, D | SHT |
| A194 | L, V, P, A, H, D | SHT |

Total Diversity: 3.22E+08

TABLE 21
Yeast Library 2c

| Wild-Type Neu2 | | Codon |
|---|---|---|
| Amino Acid(s) | Substituting Amino Acids | Usage |
| T156 | A, D, G, H, N, P, R, S, T | WC |
| F157 | A, D, F, H, L, P, S, V, Y | BHT |
| A158 | A, D, G, H, N, P, R, S, T | WC |
| V159 | A, D, F, H, L, P, S, V, Y | BHT |
| G160 | A, D, G, H, N, P, R, S, T | WC |
| P161 | A, D, F, H, L, P, S, V, Y | BHT |
| G162 | A, D, G, H, N, P, R, S, T | WC |
| H163 | A, D, F, H, L, P, S, V, Y | BHT |
| C164 | A, D, G, H, N, P, R, S, T | WC |
| L165 | A, D, F, H, L, P, S, V, Y | BHT |
| V176 | None (Wild-type) | |
| P177 | None (Wild-type) | |
| A178 | None (Wild-type) | |
| A194 | None (Wild-type) | |

Total Diversity: 3.49E+09

TABLE 22
Yeast Library 3a

| Wild-Type Neu2 | | Codon |
|---|---|---|
| Amino Acid(s) | Substituting Amino Acids | Usage |
| L4 | S, T, Y, L, F, A, P, V, I, N, D, H | NHT |
| L7 | F, Y, S, I, T, N | WHT |
| V12 | None (Wild-type) | |
| F13 | None (Wild-type) | |
| I22 | S, N, R, K, T, G, D, E, A | RMV |
| A24 | S, N, R, K, T, G, D, E, A | RMV |
| L34 | None (Wild-type) | |
| A36 | None (Wild-type) | |
| H64 | F, Y, S, I, T, N | WHT |
| P89 | F, I, L, V | NTT |
| C164 | None (Wild-type) | |
| V325 | F, Y, S, I, T, N | WHT |
| L326 | F, Y, S, I, T, N | WHT |
| L327 | F, Y, S, I, T, N | WHT |
| C332 | None (Wild-type) | |
| V363 | S, T, Y, L, F, A, P, V, I, N, D, H | NHT |

Total Diversity: 3.63E+08

TABLE 23
Yeast Library 3b

| Wild-Type Neu2 | | Codon |
|---|---|---|
| Amino Acid(s) | Substituting Amino Acids | Usage |
| L4 | None (Wild-type) | |
| L7 | F, Y, S, 1, T, N | WHT |
| V12 | S, T, Y, L, F, A, P, V, I, N, D, H | NHT |
| F13 | S, N, R, K, T, G, D, E, A | RMV |
| I22 | S, N, R, K, T, G, D, E, A | RMV |
| A24 | S, N, R, K, T, G, D, E, A | RMV |
| L34 | S, T, Y, L, F, A, P, V, I, N, D, H | NHT |
| A36 | S, T, Y, L, F, A, P, V, I, N, D, H | NHT |
| H64 | None (Wild-type) | |
| P89 | None (Wild-type) | |
| C164 | A, G, S, T | RST |
| V325 | None (Wild-type) | |
| L326 | None (Wild-type) | |
| L327 | None (Wild-type) | |
| C332 | A, D, G, H, N, P, R, S, T | VVC |
| V363 | None (Wild-type) | |

Total Diversity: 2.72E+08

TABLE 24
Yeast Library 3c

| Wild-Type Neu2 | | Codon |
|---|---|---|
| Amino Acid(s) | Substituting Amino Acids | Usage |
| L4 | None (Wild-type) | |
| L7 | None (Wild-type) | |
| V12 | None (Wild-type) | |
| F13 | None (Wild-type) | |
| I22 | S, T, Y, L, F, A, P, V, I, N, D, H | NHT |
| A24 | S, T, Y, L, F, A, P, V, I, N, D, H | NHT |
| L34 | None (Wild-type) | |
| A36 | None (Wild-type) | |
| H64 | F, Y, S, I, T, N | WHT |
| P89 | S, T, Y, L, F, A, P, V, I, N, D, H | NHT |
| C164 | A, G, S, T | RST |
| V325 | A, D, F, H, L, P, S, V, Y | BHT |
| L326 | A, D, F, H, L, P, S, V, Y | BHT |
| L327 | A, D, F, H, L, P, S, V, Y | BHT |
| C332 | A, D, G, H, N, P, R, S, T | WC |
| V363 | None (Wild-type) | |

Total Diversity: 2.72E+08

[0314] The codon usage columns in TABLES 15-24 represent degenerate codon codes used in the design of the library, where the first, second, and third positions of a given codon encoding an amino acid are as shown herein above in TABLE 14 and as described in Mena et al. (2005) PRO IHN ENG DES SEL. 18(12):559-61.

[0315] The yeast display libraries were screened for binding to a conformation-specific antibody and/or a sialic acid biotinylated probe after heating to enrich for thermal stability and expression. An exemplary yeast display screening procedure is depicted in FIG. 6. Briefly, a plasmid library encoding for the desired Neu2 variants, and yeast cells expressing the desired Neu2 variants on the surface, were generated. Yeast cells were heat shocked and then screened for binding to anti-Neu2 antibody and/or sialic acid biotinylated probe on magnetic beads. The magnetic beads were isolated to remove unbound cells, and bound cells were further analyzed for Neu2 affinity, activity, and stability as appropriate.

### D. Results

[0316] Mutant sialidases including mutations identified using the rational design, phage display, and yeast display approaches described in this Example were expressed as secreted proteins with a C-terminal human Fc tag in Expi293F cells using the pCEP4 mammalian expression vector. Expression was assayed using a ForteBio Octet with anti-human Fc sensors and Western blot and enzymatic activity was assayed using the fluorogenic substrate 4MU-NeuAc as described above.

[0317] Expression and activity levels for the mutant sialidases are shown in TABLE 25. In TABLE 25, enzymatic activity is indicated as “+++,” which denotes activity >2 fold higher than wild-type Neu2, “++,” which denotes activity comparable to wild-type Neu2, “+,” which denotes activity lower than wild-type Neu2, or “—,” which denotes no detectable activity, and expression is indicated as “++++,” which denotes expression>15 fold higher than wildtype-Neu2, “+++,” which denotes expression >6 fold higher than wild-type Neu2, “++,” which denotes expression 2-5 fold higher than wild-type Neu2, “+,” which denotes expression comparable to wild-type Neu2, or “—,” which denotes no detectable expression.

TABLE 25

| Identifier | Mutation(s) | Activity | Expression |
|---|---|---|---|
| Neu2-M104 | M1D, V6Y, P62G, I187K, C332A | + | ++++ |
| Neu2-M105 | M1D, V6Y, K9D, I187K, C332A, | + | +++ |
| | V363R, L365I | | |
| Neu2-M106 | M1D, V6Y, P62G, A93E, I187K, | ++ | ++++ |
| | C332A | | |
| Neu2-M107 | M1D, V6Y, K9D, I187K, C332A, | + | ++++ |
| | V363R, L365K | | |
| Neu2-M108 | M1D, V6Y, K9D, I187K, C332A, | + | ++++ |
| | V363R, L365S | | |
| Neu2-M109 | M1D, V6Y, K9D, I187K, C332A, | + | ++++ |
| | V363R, L365Q | | |
| Neu2-M110 | M1D, V6Y, K9D, I187K, C332A, | + | +++ |
| | V363R, L365H | | |
| Neu2-M111 | M1D, V6Y, A93K, I187K, C332A | ++ | ++ |
| Neu2-M112 | M1D, V6Y, A93E, I187K, C332A | ++ | ++ |
| Neu2-M113 | V6Y, I22N, C125Y, I187K, S301C, | − | +++ |
| | E319D | | |
| Neu2-M114 | V6Y, P62T, C125F, I187K, A222D | − | +++ |
| Neu2-M115 | V6Y, I187K, W292R | + | +++ |
| Neu2-M116 | V6Y, G107D, I187K | + | +++ |
| Neu2-M117 | C125L | + | + |
| Neu2-M118 | V6Y, C125L | + | ++ |
| Neu2-M119 | C125L, I187K | ++ | ++ |
| Neu2-M120 | V6Y, C125L, I187K | + | +++ |
| Neu2-M121 | M1D, V6Y, K45A, I187K, C332A | ++ | ++ |
| Neu2-M122 | M1D, V6Y, Q270A, I187K, C332A | ++ | +++ |
| Neu2-M123 | M1D, V6Y, K44R, K45R, I187K, | + | ++ |
| | C332A | | |
| Neu2-M124 | M1D, V6Y, Q112R, I187K, C332A | + | ++ |
| Neu2-M125 | M1D, V6Y, Q270F, I187K, C332A | + | ++ |
| Neu2-M126 | M1D, V6Y, I187K, S301R, W302K, | ++ | +++ |
| | C332A | | |
| Neu2-M127 | M1D, V6Y, K44E, K45E, I187K, | ++ | + |
| | C332A | | |
| Neu2-M128 | M1D, V6Y, I187K, L217V, C332A | + | ++ |
| Neu2-M129 | M1D, V6Y, I187K, L217A, C332A | + | ++ |
| Neu2-M130 | M1D, V6Y, I187K, C332A, Y359A | − | +++ |
| Neu2-M131 | M1D, V6Y, I187K, C332A, Y359S | − | +++ |
| Neu2-M132 | M1D, V6Y, K44E, K45E, I187K, | ++ | ++ |
| | S301R, W302K, C332A | | |
| Neu2-M133 | M1D, V6Y, Q112R, I187K, S301R, | ++ | +++ |
| | W302K, C332A | | |
| Neu2-M134 | M1D, V6Y, I187K, Q270A, S301R, | ++ | +++ |
| | W302K, C332A | | |
| Neu2-M135 | M1D, V6Y, K44E, K45E, Q112R, | + | + |
| | I187K, C332A | | |
| Neu2-M136 | M1D, V6Y, K44E, K45E, I187K, | ++ | ++ |
| | Q270A, C332A | | |
| Neu2-M137 | M1D, V6Y, K45A, I187K, Q270A, | ++ | +++ |
| | C332A | | |
| Neu2-M138 | M1D, V6Y, I187K, Q270H, C332A | ++ | +++ |
| Neu2-M139 | M1D, V6Y, I187K, Q270P, C332A | + | +++ |
| Neu2-M140 | M1D, V6Y, Q112K, I187K, C332A | ++ | ++ |
| Neu2-M141 | M1D, V6Y, P62S, I187K, Q270A, | + | +++ |
| | S301R, W302K, C332A | | |
| Neu2-M142 | M1D, V6Y, P62T, I187K, Q270A, | + | +++ |
| | S301R, W302K, C332A | | |
| Neu2-M143 | M1D, V6Y, P62N, I187K, Q270A, | + | +++ |
| | S301R, W302K, C332A | | |
| Neu2-M144 | V6Y, P62H, I187K | + | +++ |
| Neu2-M145 | V6Y, Q108H, I187K | + | ++ |
| Neu2-M146 | M1D, V6Y, P62H, I187K, C332A | ++ | +++ |
| Neu2-M147 | M1D, V6Y, P62G, I187K, C332A | ++ | ++ |
| Neu2-M148 | V6Y, P62G, I187K | + | ++ |
| Neu2-M149 | M1D, V6Y, P62H, I187K | ++ | ++ |
| Neu2-M150 | M1D, V6Y, Q108H, I187K | ++ | ++ |
| Neu2-M151 | M1D, V6Y, P62F, I187K, C332A | + | − |
| Neu2-M152 | M1D, V6Y, P62I, I187K, C332A | + | − |
| Neu2-M153 | M1D, V6Y, P62N, I187K, C332A | ++ | +++ |
| Neu2-M154 | M1D, V6Y, P62D, I187K, C332A | ++ | + |
| Neu2-M155 | M1D, V6Y, P62E, I187K, C332A | ++ | +++ |
| Neu2-M156 | V6Y, C164G, I187K, T249A | + | + |
| Neu2-M157 | V6Y, C164G, I187K | + | + |
| Neu2-M158 | V6Y, Q126L, I187K D251G | + | ++ |
| Neu2-M159 | V6Y, L54M, Q69H, R78K, A171G, | + | + |
| | I187K | | |
| Neu2-M160 | V6Y, P62T, I187K | + | ++ |
| Neu2-M161 | V6Y, A150V, I187K | + | ++ |
| Neu2-M162 | P5H, V6Y, P62S, I187K | + | ++ |
| Neu2-M163 | V6Y, C164G, I187K | + | + |

[0318] To confirm these results, Neu2-M106 (with amino acid sequence SEQ ID NO: 48, encoded by nucleotide sequence SEQ ID NO: 89) was expressed and purified with a protein A column. FIG. 7A is an image of an SDS-PAGE gel showing recombinant wildtype human Neu2 and Neu2 variant M106 (each with a C-terminal human Fc tag) under non-reducing and reducing conditions. FIG. 7B is an SEC-HPLC trace for recombinant wildtype human Neu2 and Neu2 variant M106 (each with a C-terminal human Fc tag). While Neu2-Fc had a yield of 0.3 mg/liter following protein-A purification, and monomer content of 7% as determined by SEC, Neu2-M106 had a yield of 20 mg/liter, and a monomer content of 85%.

[0319] The enzyme kinetics of Neu2-M106 were assayed by measuring the release of sialic acid from the fluorogenic substrate 4-methylumbelliferyl-N-acetylneuraminic acid (4MU-NeuAc) as described above. A fixed concentration of enzyme at 2 μg/well was incubated with fluorogenic substrate 4MU-NeuAc at concentrations ranging from 4 mM to 0.03 μM. FIG. 8 depicts the enzyme activity of Neu2 variant M106. Enzymatic activity of Neu2-M106 was comparable to wildtype Neu2, with a KM determined to be 230 μM.

[0320] Together, these results show that the mutations identified by rational design, phage display, and/or yeast display approaches described herein can increase stability and/or expression of a sialidase.

### Example 3

[0321] This Example describes the construction and expression of antibody-sialidase genetic fusion proteins, and antibody sialidase conjugates (ASCs) containing the fusion proteins, with mutated human sialidases.

[0322] The architecture for four types of exemplary ASCs is depicted in FIG. 11. The first type of ASC, referred to as “Raptor,” includes an antibody (with two heavy chains and two light chains) with a sialidase fused at the C-terminus of each heavy chain of the antibody (FIG. 11A). The second type of ASC, referred to as “Janus,” contains one antibody arm (with one heavy chain and one light chain), and one sialidase-Fc fusion with a sialidase fused at the N-terminus of one arm of the Fc. Each Fc domain polypeptide in the Janus ASC contains either the “knob” (T366Y) or “hole” (Y407T) mutation for heterodimerization (residue numbers according to EU numbering, Kabat, E.A., et al. (1991) supra) (FIG. 11B). The third type of ASC, referred to as “Lobster,” contains two Fc domain polypeptides each with a sialidase fused at the N-terminus of the Fc and a scFv fused at the C-terminus of the Fc (FIG. 11C). The fourth type of ASC, referred to as “Bunk,” contains one antibody arm (with one heavy chain and one light chain) with an scFv fused at the C-terminus of one arm of the Fc and one sialidase-Fc fusion with a sialidase fused at the N-terminus of the other arm of the Fc. Each Fc domain polypeptide in the Bunk ASC contains either the “knob” (T366Y) or “hole” (Y407T) mutation for heterodimerization (residue numbers according to EU numbering, Kabat, E.A., et al. (1991) supra) (FIG. 11D).

[0323] Janus ASCs including Neu2 variants described in Example 2 and trastuzumab were made and tested for activity and expression. Expression was assayed using a ForteBio Octet with anti-human Fc sensors and Western blot and enzymatic activity was assayed using the fluorogenic substrate 4MU-NeuAc as described above. Expression and activity levels for the

[0324] Janus ASCs are shown in TABLE 26. In TABLE 26, enzymatic activity is indicated as “+++,” which denotes activity >2 fold higher than wild-type Neu2, “++,” which denotes activity comparable to wild-type Neu2, “+,” which denotes activity lower than wild-type Neu2, or “—,” which denotes no detectable activity, and expression is indicated as “++++,” which denotes expression >15 fold higher than wildtype-Neu2, “+++,” which denotes expression >6 fold higher than wild-type Neu2, “++,” which denotes expression 2-5 fold higher than wild-type Neu2, “+,” which denotes expression comparable to wild-type Neu2, or “−”, which denotes no detectable expression.

TABLE 26

| Neu2 Variant | Mutation(s) | Activity | Expression |
|---|---|---|---|
| Neu2-M146 | M1D, V6Y, P62H, I187K, C332A | +++ | +++ |
| Neu2-M147 | M1D, V6Y, P62G, I187K, C332A | ++ | ++ |
| Neu2-M148 | V6Y, P62G, I187K | ++ | +++ |
| Neu2-M149 | M1D, V6Y, P62H, I187K | + | +++ |
| Neu2-M150 | M1D, V6Y, Q108H, I187K | ++ | ++ |
| Neu2-M151 | M1D, V6Y, P62F, I187K, C332A | ++ | +++ |
| Neu2-M152 | M1D, V6Y, P62I, I187K, C332A | ++ | +++ |
| Neu2-M153 | M1D, V6Y, P62N, I187K, C332A | ++ | +++ |
| Neu2-M154 | M1D, V6Y, P62D, I187K, C332A | ++ | ++ |
| Neu2-M155 | M1D, V6Y, P62E, I187K, C332A | ++ | + |
| Neu2-M156 | V6Y, C164G, I187K, T249A | + | + |
| Neu2-M157 | V6Y, C164G, I187K | + | + |
| Neu2-M158 | V6Y, Q126L, I187K D251G | ++ | ++ |
| Neu2-M159 | V6Y, L54M, Q69H, R78K, | + | + |
| | A171G, I187K | | |
| Neu2-M160 | V6Y, P62T, I187K | ++ | ++ |
| Neu2-M161 | V6Y, A150V, I187K | + | ++ |
| Neu2-M162 | P5H, V6Y, P62S, I187K | ++ | ++ |
| Neu2-M163 | V6Y, C164G, I187K | + | + |

[0325] Additional Janus ASCs including Neu2 variants described in Example 2 and trastuzumab were made and tested for activity and expression. Janus ASCs were expressed in Expi293F cells in 500 mL cultures and purified using protein A and ion exchange chromatography. Expression was assayed using a ForteBio Octet with anti-human Fc sensors and Western blot and enzymatic activity was assayed using the fluorogenic substrate 4MU-NeuAc as described above. Expression and activity levels for the Janus ASCs are shown in TABLE 27. In TABLE 27, enzymatic activity is indicated as “+++,” which denotes activity >2 fold higher than wild-type Neu2, “++,” which denotes activity comparable to wild-type Neu2, “+,” which denotes activity lower than wild-type Neu2, or “−,” which denotes no detectable activity, and expression is indicated as “++++,” which denotes expression >15 fold higher than wildtype-Neu2, “+++,” which denotes expression >6 fold higher than wild-type Neu2, “++,” which denotes expression 2-5 fold higher than wild-type Neu2, “+,” which denotes expression comparable to wild-type Neu2, or “−”which denotes no detectable expression.

TABLE 27

| Neu2 Variant | Mutation(s) | Activity | Expression |
|---|---|---|---|
| Neu2-M106 | M1D, V6Y, P62G, A93E, | ++ | ++++ |
| | I187K, C332A | | |
| Neu2-M134 | M1D, V6Y, I187K, Q270A, | +++ | ++++ |
| | S301R, W302K, C332A | | |
| Neu2-M141 | M1D, V6Y, P62S, I187K, | ++ | ++++ |
| | Q270A, S301R, W302K, C332A | | |
| Neu2-M142 | M1D, V6Y, P62T, I187K, | ++ | ++++ |
| | Q270A, S301R, W302K, C332A | | |
| Neu2-M143 | M1D, V6Y, P62N, I187K, | ++ | ++++ |
| | Q270A, S301R, W302K, C332A | | |
| Neu2-M153 | M1D, V6Y, P62N, I187K, | ++ | ++++ |
| | C332A | | |

### Example 4

[0326] This example describes the construction of recombinant human sialidases with mutations that increase expression and/or activity of the sialidase.

[0327] Unless indicated otherwise, mutant sialidases in this Example were expressed as secreted proteins with a C-terminal human Fc tag in Expi293F cells using the pCEP4 mammalian expression vector. Expression was assayed using a ForteBio Octet with anti-human Fc sensors and Western blot and enzymatic activity was assayed using the fluorogenic substrate 4MU-NeuAc as described above.

[0328] Mutant Neu2 sialidases were constructed including rationally designed substitutions at position Q126. Inspection of the Neu2 crystal structure revealed that mutation of Q126 may increase interactions with neighboring amino acid residues.

[0329] Additional mutant Neu2 sialidases were constructed including rationally designed substitution at position Q270. Inspection of the Neu2 crystal structure revealed that mutation of Q270 to certain amino acids may stabilize interactions with R237 and stabilize binding in the substrate pocket.

[0330] Additional mutant Neu2 sialidases were constructed including a substitution of an amino acid residue in a beta turn with a proline (for example D8OP, R189P, and/or H239P substitutions). Substitution with a proline at these positions may, for example, stabilize the protein by influencing local protein folding.

[0331] Expression and activity levels for the resulting mutant sialidases are shown in TABLE 28. In TABLE 28, enzymatic activity is indicated as “++,” which denotes activity comparable to wild-type Neu2, “+,” which denotes activity lower than wild-type Neu2, or “−,” which denotes no detectable activity, and expression is indicated as “+++++”, which denotes expression >40 fold higher than wildtype-Neu2, “++++”, which denotes expression >15 fold higher than wildtype-Neu2, “+++,” which denotes expression >6 fold higher than wild-type Neu2, “++,” which denotes expression 2-5 fold higher than wild-type Neu2, “+,” which denotes expression comparable to wild-type Neu2, or “_{Th}”which denotes no detectable expression.

TABLE 28

| Identifier | Mutation(s) | Activity | Expression |
|---|---|---|---|
| Neu2- | M1D, V6Y, P62G, A93E, | ++ | ++++ |
| M164 | Q126E, I187K, C332A | | |
| Neu2- | M1D, V6Y, P62G, A93E, | ++ | ++++ |
| M165 | Q126I, I187K, C332A | | |
| Neu2- | M1D, V6Y, P62G, A93E, | + | +++++ |
| M166 | Q126L, I187K, C332A | | |
| Neu2- | M1D, V6Y, P62G, A93E, | + | +++++ |
| M167 | Q126Y, I187K, C332A | | |
| Neu2- | M1D, V6Y, P62G, A93E, | + | +++++ |
| M168 | Q126F, I187K, C332A | | |
| Neu2- | M1D, V6Y, P62G, A93E, | ++ | ++++ |
| M169 | Q126H, I187K, C332A | | |
| Neu2- | M1D, V6Y, P62G, A93E, | ++ | ++++ |
| M170 | I187K, Q270S, C332A | | |
| Neu2- | M1D, V6Y, P62G, A93E, | ++ | ++++ |
| M171 | I187K, Q270T, C332A | | |
| Neu2- | M1D, V6Y, P62G, A93E, | ++ | +++++ |
| M172 | Q126Y, I187K, Q270T, | | |
| | C332A | | |
| Neu2- | M1D, V6Y, P62G, A93E, | ++ | +++++ |
| M173 | Q126Y, I187K, A242F, | | |
| | Q270T, C332A | | |
| Neu2- | M1D, V6Y, P62G, D80P, | ++ | ++++ |
| M174 | A93E, I187K, C332A | | |
| Neu2- | M1D, V6Y, P62G, A93E, | ++ | +++ |
| M175 | R170P, I187K, C332A | | |
| Neu2- | M1D, V6Y, P62G, A93E, | ++ | ++++ |
| M176 | I187K, Q188P, C332A | | |
| Neu2- | M1D, V6Y, P62G, A93E, | ++ | ++++ |
| M177 | I187K, R189P, C332A | | |
| Neu2- | M1D, V6Y, P62G, A93E, | + | ++++ |
| M178 | I187K, E225P, C332A | | |
| Neu2- | M1D, V6Y, P62G, A93E, | ++ | ++++ |
| M179 | I187K, H239P, C332A | | |
| Neu2- | M1D, V6Y, P62G, A93E, | ++ | +++ |
| M180 | I187K, E257P, C332A | | |

[0332] To confirm these results, Neu2-M173 (with amino acid sequence SEQ ID NO: 159, encoded by nucleotide sequence SEQ ID NO: 181) was expressed with a C-terminal human Fc tag and purified with a protein A and a ceramic hydroxyapatite (CHT) column. FIG. 22A is an image of an SDS-PAGE gel showing Neu2-M173-Fc (with a C-terminal human Fc tag) under non-reducing and reducing conditions. FIG. 22B is an SEC-HPLC trace for Neu2-M173-Fc (with a C-terminal human Fc tag). Neu2-M173-Fc had a yield of 120 mg/liter, and a monomer content of 90%.

[0333] The enzyme kinetics of Neu2-M173-Fc were assayed by measuring the release of sialic acid from the fluorogenic substrate 4-methylumbelliferyl-N-acetylneuraminic acid (4MU-NeuAc) as described above. A fixed concentration of enzyme at 2 μg/well was incubated with fluorogenic substrate 4MU-NeuAc at concentrations ranging from 4mM to 0.03 μM. FIG. 23 depicts the enzyme activity of Neu2-M173-Fc. Enzymatic activity of Neu2-M173-Fc was comparable to wildtype Neu2, with a K_{M} determined to be 230 μM.

[0334] Additional mutant Neu2 sialidases were constructed including rationally designed substitutions at positions S301 and/or W302. Mutations of S301 and/or W302 may influence interactions with neighboring amino acid residues and/or substrate.

[0335] Expression and activity levels for the mutant sialidases are shown in TABLE 29. In TABLE 29, enzymatic activity is indicated as “++,” which denotes activity comparable to wild-type Neu2, “+,” which denotes activity lower than wild-type Neu2, or “—,” which denotes no detectable activity, and expression is indicated as “+++++”, which denotes expression >40 fold higher than wildtype-Neu2, “++++”, which denotes expression >15 fold higher than wildtype-Neu2, “+++,” which denotes expression >6 fold higher than wild-type Neu2, “++,” which denotes expression 2-5 fold higher than wild-type Neu2, “+,” which denotes expression comparable to wild-type Neu2, or “−”which denotes no detectable expression.

TABLE 29

| Identifier | Mutation(s) | Activity | Expression |
|---|---|---|---|
| Neu2-M182 | M1D, V6Y, P62G, A93E, | ++ | ++++ |
| | I187K, S301A, C332A | | |
| Neu2-M183 | M1D, V6Y, P62G, A93E, | ++ | ++++ |
| | I187K, S301D, C332A | | |
| Neu2-M184 | M1D, V6Y, P62G, A93E, | ++ | +++ |
| | I187K, S301E, C332A | | |
| Neu2-M185 | M1D, V6Y, P62G, A93E, | + | ++++ |
| | I187K, S301F, C332A | | |
| Neu2-M186 | M1D, V6Y, P62G, A93E, | + | ++++ |
| | I187K, S301H, C332A | | |
| Neu2-M187 | M1D, V6Y, P62G, A93E, | ++ | +++++ |
| | I187K, S301K, C332A | | |
| Neu2-M188 | M1D, V6Y, P62G, A93E, | ++ | ++++ |
| | I187K, S301L, C332A | | |
| Neu2-M189 | M1D, V6Y, P62G, A93E, | ++ | ++++ |
| | I187K, S301M, C332A | | |
| Neu2-M190 | M1D, V6Y, P62G, A93E, | ++ | ++++ |
| | I187K, S301N, C332A | | |
| Neu2-M191 | M1D, V6Y, P62G, A93E, | ++ | ++++ |
| | I187K, S301P, C332A | | |
| Neu2-M192 | M1D, V6Y, P62G, A93E, | ++ | +++ |
| | I187K, S301Q, C332A | | |
| Neu2-M193 | M1D, V6Y, P62G, A93E, | ++ | +++++ |
| | I187K, S301R, C332A | | |
| Neu2-M194 | M1D, V6Y, P62G, A93E, | ++ | ++++ |
| | I187K, S301T, C332A | | |
| Neu2-M195 | M1D, V6Y, P62G, A93E, | ++ | ++++ |
| | I187K, S301V, C332A | | |
| Neu2-M196 | M1D, V6Y, P62G, A93E, | + | ++++ |
| | I187K, S301W, C332A | | |
| Neu2-M197 | M1D, V6Y, P62G, A93E, | ++ | ++++ |
| | I187K, S301Y, C332A | | |
| Neu2-M198 | M1D, V6Y, P62G, A93E, | + | ++++ |
| | I187K, W302A, C332A | | |
| Neu2-M199 | M1D, V6Y, P62G, A93E, | +++ | +++ |
| | I187K, W302D, C332A | | |
| Neu2-M200 | M1D, V6Y, P62G, A93E, | + | ++++ |
| | I187K, W302F, C332A | | |
| Neu2-M201 | M1D, V6Y, P62G, A93E, | ++ | ++++ |
| | I187K, W302G, C332A | | |
| Neu2-M202 | M1D, V6Y, P62G, A93E, | + | ++++ |
| | I187K, W302H, C332A | | |
| Neu2-M203 | M1D, V6Y, P62G, A93E, | + | ++++ |
| | I187K, W302I, C332A | | |
| Neu2-M204 | M1D, V6Y, P62G, A93E, | ++ | ++++ |
| | I187K, W302L, C332A | | |
| Neu2-M205 | M1D, V6Y, P62G, A93E, | + | ++ |
| | I187K, W302M, 332A | | |
| Neu2-M206 | M1D, V6Y, P62G, A93E, | + | ++++ |
| | I187K, W302N, C332A | | |
| Neu2-M207 | M1D, V6Y, P62G, A93E, | − | ++++ |
| | I187K, W302P, C332A | | |
| Neu2-M208 | M1D, V6Y, P62G, A93E, | ++ | ++++ |
| | I187K, W302Q, C332A | | |
| Neu2-M209 | M1D, V6Y, P62G, A93E, | ++ | +++++ |
| | I187K, W302R, C332A | | |
| Neu2-M210 | M1D, V6Y, P62G, A93E, | ++ | ++++ |
| | I187K, W302S, C332A | | |
| Neu2-M211 | M1D, V6Y, P62G, A93E, | ++ | ++++ |
| | I187K, W302T, C332A | | |
| Neu2-M212 | M1D, V6Y, P62G, A93E, | + | ++++ |
| | I187K, W302V, C332A | | |
| Neu2-M213 | M1D, V6Y, P62G, A93E, | + | ++++ |
| | I187K, W302Y, C332A | | |
| Neu2-M214 | M1D, V6Y, P62G, A93E, | ++ | ++++ |
| | I187K, S301A, W302A, C332A | | |
| Neu2-M215 | M1D, V6Y, P62G, A93E, | + | ++++ |
| | I187K, S301A, W302R, C332A | | |
| Neu2-M216 | M1D, V6Y, P62G, A93E, | ++ | ++++ |
| | I187K, S301A, W302S, C332A | | |
| Neu2-M217 | M1D, V6Y, P62G, A93E, | ++ | ++++ |
| | I187K, S301A, W302T, C332A | | |
| Neu2-M218 | M1D, V6Y, P62G, A93E, | + | ++++ |
| | I187K, S301K, W302S, C332A | | |
| Neu2-M219 | M1D, V6Y, P62G, A93E, | ++ | +++++ |
| | I187K, S301K, W302R, C332A | | |
| Neu2-M219 | M1D, V6Y, P62G, A93E, | ++ | ++++ |
| | I187K, S301K, W302T, C332A | | |
| Neu2-M220 | M1D, V6Y, P62G, A93E, | + | ++++ |
| | I187K, S301N, W302S, C332A | | |
| Neu2-M221 | M1D, V6Y, P62G, A93E, | ++ | ++++ |
| | I187K, S301N, W302T, C332A | | |
| Neu2-M222 | M1D, V6Y, P62G, A93E, | + | ++++ |
| | I187K, S301T, W302R, C332A | | |

### Example 5

[0336] This example describes the construction of recombinant human sialidases with mutations that reduce proteolytic cleavage.

[0337] Neu2-M106 (as described in Example 2, and with amino acid sequence SEQ ID NO: 48) was expressed as an Fc-fused single chain protein using a CHO cell expression system in a large scale (10 L) high cell density production and purified with a protein A column. The resulting protein was analyzed by SDS-PAGE. Results are shown in FIG. 24. Under reducing conditions, the protein included a mixture of full length (70 kDa, approx. 50%) and cleaved (40 kDa and 30 kDa, approx. 50%) fractions. However, in non-reducing conditions, there was no cleavage and the protein remained as a single chain (FIG. 24). Additionally, when Neu2-M106 was expressed on a smaller scale (with a shorter duration of cell culture and lower cell density) there was no cleavage and the protein remained as a single chain. A preliminary mass spectrometry analysis showed that the 40 kDa and 30 kDa molecular weight fractions observed under reducing conditions following large scale production are a result of cleavage between amino acid residues R243 and V244 of the sialidase. The enzymatic activity of cleaved Neu2-M106 was similar to that of uncleaved Neu2-M106.

[0338] It was hypothesized that the cleavage of Neu2-M106 could be due to the activity of intracellular proteases released as a result of cell lysis during protein production, harvesting, and/or purification. To test this hypothesis, cleaved Neu2-M106 (prepared using the large scale-production described above that results in cleavage) and uncleaved Neu2-M106 (prepared using the smaller scale production described above that does not result in cleavage) were both incubated with trypsin and analyzed by SDS-PAGE under reducing conditions (FIG. 25). Briefly, trypsin digestion reactions were performed by incubation of trypsin (5 μL, 0.005% solution in PBS) with Neu2-M106 (25 μL, 0.25 mg/mL in PBS pH 8.0) for 5 minutes on ice. Reactions were stopped by addition of LDS gel loading buffer (5 μL) and run on a reducing SDS-PAGE gel to observe trypsin mediated cleavage. The SDS-PAGE analysis showed that incubation of the uncleaved Neu2-M106 with trypsin resulted in the same cleavage pattern as that of the cleaved Neu2-M106. Additionally, incubation of the cleaved Neu2-M106 with trypsin resulted in increased intensity of the bands corresponding to the cleavage products.

[0339] Neu2-M106 was also incubated with trypsin in the presence of various protease inhibitors. Briefly, trypsin digestion reactions were performed by incubation of trypsin (0.005%) with Neu2-M106 (0.5 mg/mL) and protease inhibitor for 5 minutes on ice. Reactions were stopped by addition of LDS gel loading buffer and run on a reducing SDS-PAGE gel to observe trypsin mediated cleavage. Inhibitors used included iron citrate (at 0.3 and 5 mM), aprotinin (at 5,000 and 20,000 U/mL), AEBSF (at 0.1 and 1 mM), leupeptin (at 1 and 10 μM) or E-64 (at 1 and 10 μM). As seen in FIG. 26, protease inhibitors reduced the extent of trypsin cleavage.

[0340] Together, these results confirm that cleavage of Neu2-M106 following large-scale production is due to trypsin or a member of a similar class of proteases.

[0341] We next attempted to rationally design recombinant human sialidases with mutations that increase resistance to trypsin cleavage.

[0342] Unless indicated otherwise, in the remainder of this Example mutant sialidases were expressed as secreted proteins with a C-terminal human Fc tag in Expi293F cells (on a 50 mL scale) using the pCEP4 mammalian expression vector. The resulting protein was purified using a Protein A column. Expression was assayed using a ForteBio Octet with anti-human Fc sensors and Western blot and enzymatic activity was assayed using the fluorogenic substrate 4MU-NeuAc as described above. Protease cleavage was assayed by SDS-PAGE as described above.

[0343] First, R243 was mutated to different polar/charged amino acids such as K, E, H, N and Q. However, these mutations of R243 resulted in complete loss of activity and reduction in expression yields (R243 is also a conserved amino acid among similar sialidases).

[0344] Next, various amino residues surrounding the cleavage site were mutated and tested for expression, activity and trypsin cleavage resistance. Substitutions and combinations of substitutions that were tested are shown in FIG. 27. All mutations were tested in a Neu2-M106 background (i.e., including M1D, V6Y, P62G, A93E, I187K, and C332A substitutions).

[0345] Most of the mutant sialidases depicted in FIG. 27 expressed well, however only two of the mutant sialidases (including V244I or A242C mutations) were active. The A242C mutation resulted in greater than 10 fold improved trypsin resistance and slightly lower activity (both relative to Neu2-M106). However, having an unpaired cysteine could be a potential liability, so, A242 was mutated to all 19 other amino acids and assayed for activity and trypsin resistance. As shown in FIG. 28, mutation of A242 to aromatic amino acids such as F, W and Y resulted in a dramatic improvement in trypsin cleavage resistance compared to Neu2-M106 (FIG. 28A) and similar enzymatic activity to Neu2-M106 (FIG. 28B). SEC analysis showed that proteins containing each of these mutations had a similar pattern to that of Neu2-M106 and more than 95% monomer content (FIG. 28C).

[0346] Structural analysis showed that replacing A242 with an aromatic amino acid could provide additional hydrophobic or stacking interactions to L260 and V265 (nonpolar amino acids located in the vicinity of the A242). Therefore, L260 and V265 were also mutated to phenylalanine. Along with these mutations several other rationally designed mutants, which could provide extra stability, for example by increasing stacking interactions, were also tested for expression, activity, and protease resistance.

[0347] Select results are shown in FIG. 29. As shown in FIG. 29, the combination of R241Y and A242F mutations (Neu2-M255) resulted in the most resistance to trypsin cleavage (a greater than 10 fold improved trypsin resistance relative to Neu2-M106).

[0348] Expression, activity, and protease resistance levels for the mutant sialidases are shown in TABLE 30. In TABLE 30, enzymatic activity is indicated as “++,” which denotes activity comparable to wild-type Neu2, “+,” which denotes activity lower than wild-type Neu2, or “−,” which denotes no detectable activity, and expression is indicated as “+++++”, which denotes expression >40 fold higher than wildtype-Neu2, “++++”, which denotes expression >15 fold higher than wildtype-Neu2, “+++,” which denotes expression >6 fold higher than wild-type Neu2, “++,” which denotes expression 2-5 fold higher than wild-type Neu2, “+,” which denotes expression comparable to wild-type Neu2, or “−”which denotes no detectable expression. Protease/trypsin resistance is indicated as “+++,” which denotes resistance >10 fold higher than Neu2-M106; “++,” which denotes resistance >5 fold higher than Neu2-M106, “+,” denotes resistance comparable to Neu2-M106, or “—,” which denotes resistance lower than Neu2-M106. NT=not tested.

TABLE 30

| | | | | Pro- |
|---|---|---|---|---|
| | | | | tease |
| | | | Ex- | resis- |
| Identifier | Mutation(s) | Activity | pression | tance |
| Neu2-M223 | M1D, V6Y, P62G, A93E, | ++ | +++++ | + |
| | I187K, L240Y, C332A | | | |
| Neu2-M224 | M1D, V6Y, P62G, A93E, | + | +++ | +++ |
| | I187K, A242C, C332A | | | |
| Neu2-M225 | M1D, V6Y, P62G, A93E, | − | ++++ | − |
| | I187K, A242D, C332A | | | |
| Neu2-M226 | M1D, V6Y, P62G, A93E, | − | +++ | − |
| | I187K, A242E, C332A | | | |
| Neu2-M227 | M1D, V6Y, P62G, A93E, | ++ | ++++ | ++ |
| | I187K, A242F, C332A | | | |
| Neu2-M228 | M1D, V6Y, P62G, A93E, | + | +++ | + |
| | I187K, A242G, C332A | | | |
| Neu2-M229 | M1D, V6Y, P62G, A93E, | + | +++ | + |
| | I187K, A242H, C332A | | | |
| Neu2-M230 | M1D, V6Y, P62G, A93E, | + | +++ | + |
| | I187K, A242I, C332A | | | |
| Neu2-M231 | M1D, V6Y, P62G, A93E, | + | ++++ | − |
| | I187K, A242K, C332A | | | |
| Neu2-M232 | M1D, V6Y, P62G, A93E, | + | +++ | + |
| | I187K, A242L, C332A | | | |
| Neu2-M233 | M1D, V6Y, P62G, A93E, | + | +++ | + |
| | I187K, A242M, C332A | | | |
| Neu2-M234 | M1D, V6Y, P62G, A93E, | + | ++++ | ++ |
| | I187K, A242N, C332A | | | |
| Neu2-M235 | M1D, V6Y, P62G, A93E, | + | +++ | ++ |
| | I187K, A242Q, C332A | | | |
| Neu2-M236 | M1D, V6Y, P62G, A93E, | + | ++++ | − |
| | I187K, A242R, C332A | | | |
| Neu2-M237 | M1D, V6Y, P62G, A93E, | + | +++ | − |
| | I187K, A242S, C332A | | | |
| Neu2-M238 | M1D, V6Y, P62G, A93E, | − | +++ | + |
| | I187K, A242T, C332A | | | |
| Neu2-M239 | M1D, V6Y, P62G, A93E, | + | +++ | + |
| | I187K, A242V, C332A | | | |
| Neu2-M240 | M1D, V6Y, P62G, A93E, | ++ | ++++ | ++ |
| | I187K, A242W, C332A | | | |
| Neu2-M241 | M1D, V6Y, P62G, A93E, | ++ | ++++ | ++ |
| | I187K, A242Y, C332A | | | |
| Neu2-M242 | M1D, V6Y, P62G, A93E, | ++ | ++++ | ++ |
| | I187K, A242F, L260F, C332A | | | |
| Neu2-M243 | M1D, V6Y, P62G, A93E, | + | ++++ | ++ |
| | I187K, A242F, V265F, C332A | | | |
| Neu2-M244 | M1D, V6Y, P62G, A93E, | + | ++++ | ++ |
| | I187K, A242F, A213C, C332A | | | |
| Neu2-M245 | M1D, V6Y, P62G, A93E, | + | ++++ | ++ |
| | I187K, A242F, A213S, C332A | | | |
| Neu2-M246 | M1D, V6Y, P62G, A93E, | ++ | ++++ | ++ |
| | I187K, A242F, A213T, C332A | | | |
| Neu2-M247 | M1D, V6Y, P62G, A93E, | + | ++ | NT |
| | I187K, A242F, A213N, C332A | | | |
| Neu2-M248 | M1D, V6Y, P62G, A93E, | ++ | ++++ | ++ |
| | I187K, A242F, A213C, | | | |
| | S258C, C332A | | | |
| Neu2-M249 | M1D, V6Y, P62G, A93E, | ++ | +++++ | + |
| | I187K, L240Y, L260F, C332A | | | |
| Neu2-M250 | M1D, V6Y, P62G, A93E, | + | + | NT |
| | I187K, L240D, L260T, C332A | | | |
| Neu2-M251 | M1D, V6Y, P62G, A93E, | + | ++ | NT |
| | I187K, L240N, L260D, C332A | | | |
| Neu2-M252 | M1D, V6Y, P62G, A93E, | ++ | ++++ | + |
| | I187K, L240N, L260T, C332A | | | |
| Neu2-M253 | M1D, V6Y, P62G, A93E, | ++ | ++++ | + |
| | I187K, L240N, L260Q, C332A | | | |
| Neu2-M254 | M1D, V6Y, P62G, A93E, | ++ | +++ | ++ |
| | I187K, R241A, A242F, C332A | | | |
| Neu2-M255 | M1D, V6Y, P62G, A93E, | ++ | +++ | +++ |
| | I187K, R241Y, A242F, C332A | | | |
| Neu2-M256 | M1D, V6Y, P62G, A93E, | ++ | +++++ | ++ |
| | Q126Y, I187K, L240Y, A242F, | | | |
| | Q270T, C332A | | | |
| Neu2-M257 | M1D, V6Y, P62G, A93E, | ++ | ++++ | + |
| | I187K, V244I, C332A | | | |
| Neu2-M258 | M1D, V6Y, P62G, A93E, | + | +++ | ++ |
| | I187K, A242C, V244K, C332A | | | |

### Example 6

[0349] This Example describes the construction and expression of antibody-sialidase genetic fusion proteins, and antibody sialidase conjugates (ASCs) containing the fusion proteins, with mutated human sialidases.

[0350] A Janus Antibody Sialidase Conjugate (ASC) was made using Neu2 with M1D, V6Y, P62G, A93E, I187K and C332A substitutions and Trastuzumab, referred to in this Example as “Janus Trastuzumab”. This Janus Trastuzumab (including a first polypeptide chain with amino acid sequence SEQ ID NO: 66, encoded by nucleotide sequence SEQ ID NO: 86, a second polypeptide chain with amino acid sequence SEQ ID NO: 67, encoded by nucleotide sequence SEQ ID NO: 87, and a third polypeptide chain with amino acid sequence SEQ ID NO: 68, encoded by nucleotide sequence SEQ ID NO: 88) was expressed and characterized for purity using SDS-PAGE and enzymatic activity using 4MU-NeuAc as described below.

[0351] Janus Trastuzumab was expressed in a 1L transfection of Expi293 human cells using the pCEP4 mammalian expression vector. Janus Trastuzumab was purified using Protein A, followed by cation exchange chromatography (Hitrap SP-HP, GE Lifesciences). Purified proteins were analyzed by SDS-PAGE (FIG. 12), and SEC-HPLC (FIG. 13). Expression yield was 30mg/L, with 90% monomer purity as determined by SEC-HPLC.

[0352] The enzymatic activity of the recombinantly expressed Janus Trastuzumab was assayed by measuring the release of sialic acid from the fluorogenic substrate 4-methylumbelliferyl-N-acetylneuraminic acid (4MU-NeuAc). Specifically, an enzyme kinetics assay was performed using a fixed concentration of enzyme at 2m/well, which was incubated with fluorogenic substrate 4MU-NeuAc at concentrations ranging from 4000 μM to 7.8 μM. As shown in FIG. 14, Janus Trastuzumab was enzymatically active, with a Km of 0.48 mM.

[0353] Janus Trastuzumab was tested for antigen (Her2) binding by using ForteBio Octet with the ASC captured on anti-Fc sensors with dipping into serial dilutions of His-tagged Her2 (50 to 0.78 nM at 1:2 dilutions). Janus Trastuzumab bound to Her2 with comparable binding affinity to trastuzumab (FIG. 15).

### Example 7

[0354] This Example describes the in vivo administration of antibody sialidase conjugates (ASCs) containing bacterial sialidases.

[0355] The following ASCs were made and tested in this Example: (i) a Janus ASC including Salmonella typhimurium sialidase (St-sialidase) and trastuzumab (including a first polypeptide chain with amino acid sequence SEQ ID NO: 66, encoded by nucleotide sequence SEQ ID NO: 86, a second polypeptide chain with amino acid sequence SEQ ID NO: 67, encoded by nucleotide sequence SEQ ID NO: 87, and a third polypeptide chain with amino acid sequence SEQ ID NO: 90, encoded by nucleotide sequence SEQ ID NO: 91); (ii) a Raptor ASC including St-sialidase and trastuzumab (including first and fourth polypeptide chains with amino acid sequence SEQ ID NO: 66, encoded by nucleotide sequence SEQ ID NO: 86, and second and third polypeptide chains with amino acid sequence SEQ ID NO: 92, encoded by nucleotide sequence SEQ ID NO: 93); and (iii) a Lobster ASC including St-sialidase and an scFv derived from trastuzumab (including first and second polypeptide chains with amino acid sequence SEQ ID NO: 94, encoded by nucleotide sequence SEQ ID NO: 95).

[0356] These ASCs were compared to trastuzumab in a mouse syngeneic tumor model injected with a murine breast cancer cell line expressing human Her2 (EMT6-hHer2 cells). Female BALB/c mice, 6-8 weeks of age, were inoculated subcutaneously in the right lower flank region with EMT6-Her2 tumor cells (5×10⁵) in 0.1 ml of PBS for tumor development. Mice were randomly allocated to 8 groups when tumors reached 50-100 mm³, mean ˜75-100 mm³. Treatment groups are described in TABLE 31 with dosing schedule indicated post randomization. Anti-mouse NK1.1 (Clone: PK136; BioXcell, 621717N1), anti-mouse CD8α (Clone: 53-6.7; BioXcell, BE0004-1) and liposomal clodronate (FormuMax Scientific, Inc.) were included in treatment groups as indicated.

TABLE 31

| | Animal | | Dose | Dose | | Schedule |
|---|---|---|---|---|---|---|
| Group | No. | Treatment | (mg/kg) | volume(μL/g) | Route | (Days) |
| 1 | 8 | Vehicle (PBS) | NA | 10 | i.p. | 0, 3, 7, 10, |
| | | | | | | 14, 17 |
| 2 | 8 | Trastuzumab | 10 | 10 | i.p. | 0, 3, 7, 10, |
| | | | | | | 14, 17 |
| 3 | 8 | Raptor | 10 | 10 | i.p. | 0, 3, 7, 10, |
| | | | | | | 14, 17 |
| 4 | 8 | Janus | 10 | 10 | i.p. | 0, 3, 7, 10, |
| | | | | | | 14, 17 |
| 5 | 8 | Lobster | 10 | 10 | i.p. | 0, 3, 7, 10, |
| | | | | | | 14, 17 |
| 6 | 8 | Janus | 10 | 10 | i.p. | 0, 3, 7, 10, |
| | | | | | | 14, 17 |
| | | anti-mouse NK 1.1 | 10 | 10 | i.p. | 0, 3, 7, 10, |
| | | (Clone: PK136) | | | | 14, 17 |
| 7 | 8 | Janus | 10 | 10 | i.p. | 0, 3, 7, 10, |
| | | | | | | 14, 17 |
| | | anti-mouse CD8α | 10 | 10 | i.p. | 0, 3, 7, 10, |
| | | (Clone: 53-6.7) | | | | 14, 17 |
| 8 | 8 | Janus | 10 | 10 | i.p. | 0, 3, 7, 10, |
| | | | | | | 14, 17 |
| | | liposomal | 0.5 | 100 | i.p. | TIW × 2 wks |
| | | clodronate | mg/mouse | μL/mouse | | |

[0357] The results from for treatment with trastuzumab, and Raptor, Janus and Lobster ASCs are shown in FIGS. 16A, 16B, 16C and 16D respectively. As can be seen, trastuzumab resulted in no complete responses in eight individual mice as treated (defined as regression below the limit of palpation at any point for the duration of the study, FIG. 16A). This is in contrast to Raptor, which demonstrated 2 out of 8 animals with a complete response (FIG. 16B), Janus which demonstrated 3 out of 8 animals with a complete response (FIG. 16C) and Lobster which demonstrated 2 out of 8 animals with a complete response (FIG. 16D).

[0358] The results of administration of Janus with NK depletion (anti-mouse NK1.1), macrophage depletion (liposomal clodronate) and CD8 T cell depletion (anti-mouse CD8α) are shown in FIG. 17. As can be seen, compared to Janus treatment alone (FIG. 16C), where there was a complete response in 3 out of 8 animals, NK depletion reduced the number of complete responses to 1 out of 8 animals (FIG. 17A). Macrophage depletion also reduced the number of complete responses to 1 out of 8 animals (FIG. 17B). CD8 T cell depletion completely reversed the effects of Janus, with no animals showing a complete response (FIG. 17C). FIG. 17D shows the mean tumor volume for vehicle, Janus alone, trastuzumab alone and Janus with NK, macrophage and CD8 T cell depletions. These results demonstrate that innate immunity (NK and macrophage dependent) as well as adaptive immunity (CD8 T cells) contribute to in vivo ASC activity.

### Example 8

[0359] This Example describes the in vivo administration of antibody sialidase conjugates (ASCs) with bacterial sialidases.

[0360] The following ASCs were made and tested in this Example: (i) a Janus ASC including Salmonella typhimurium sialidase (St-sialidase) and trastuzumab (including a first polypeptide chain with amino acid sequence SEQ ID NO: 66, encoded by nucleotide sequence SEQ ID NO: 86, a second polypeptide chain with amino acid sequence SEQ ID NO: 67, encoded by nucleotide sequence SEQ ID NO: 87, and a third polypeptide chain with amino acid sequence SEQ ID NO: 90, encoded by nucleotide sequence SEQ ID NO: 91); and (ii) a Janus ASC including St-sialidase with two loss of function mutations, D100V and G231V, and trastuzumab (“Janus-LOF,” including a first polypeptide chain with amino acid sequence SEQ ID NO: 66, encoded by nucleotide sequence SEQ ID NO: 86, a second polypeptide chain with amino acid sequence SEQ ID NO: 67, encoded by nucleotide sequence SEQ ID NO: 87, and a third polypeptide chain with amino acid sequence SEQ ID NO: 96, encoded by nucleotide sequence SEQ ID NO: 97).

[0361] These ASCs were tested in a mouse syngeneic orthotopic tumor model injected with an independent EMT6 cell line expressing human Her2 (EMT6-hHer2 cells as described in D′Amico et al. (2016) ANNALS OF ONCOLOGY, Volume 27, Issue suppl 8, 41P. Female BALB/c mice, 6-8 weeks of age, were inoculated via intra mammary implantation with EMT6-Her2 tumor cells (5×10⁶). Mice were randomly allocated to 6 groups when tumors reached approximately 250 mm³. The treatment groups are described in TABLE 32 with dosing schedule indicated post randomization. Anti-mouse PD1 was obtained from BioXcell (RMP1-14, Cat. # 665418F1).

TABLE 32

| | | | | Dose | | |
|---|---|---|---|---|---|---|
| | Animal | | Dose | volume | | Schedule |
| Group | No. | Treatment | (mg/kg) | (μL/g) | Route | (Days) |
| 1 | 6 | Vehicle | NA | 10 | i.p. | 0, 3, 7, 10 |
| | | (PBS) | | | | |
| 2 | 6 | Trastuzumab | 10 | 10 | i.p. | 0, 3, 7, 10 |
| 3 | 6 | Janus | 10 | 10 | i.p. | 0, 3, 7, 10 |
| 4 | 6 | Janus Loss of | 10 | 10 | i.p. | 0, 3, 7, 10 |
| | | Function | | | | |
| | | (LOF) | | | | |
| 5 | 6 | anti-mouse | 10 | 10 | i.p. | 0, 3, 7, 10 |
| | | PD1 | | | | |
| 6 | 6 | Janus | 10 | 10 | i.p. | 0, 3, 7, 10 |
| | | anti-mouse | 10 | 10 | i.p. | 0, 3, 7, 10 |
| | | PD1 | | | | |

[0362] The results for Groups 1 through 4 (vehicle, trastuzumab, Janus and Janus LOF) are shown in FIG. 18A. As can be seen, 3 out of 6 animals treated with Janus had a complete regression of tumor growth. Notably, Janus LOF and trastuzumab were both comparable to vehicle treated animals.

[0363] The 3 mice with a complete regression (“cured mice”) were rechallenged with either the same EMT6-Her2 cells used originally or parental EMT6 cells (lacking engineered human Her2 expression). EMT6 cells and EMT6-Her2 cells were inoculated subcutaneously in the right or left lower flank region respectively (5×10⁵) in 0.1 ml of PBS for tumor development of all three cured mice. EMT6-Her2 cells were also inoculated subcutaneously into naïve mice as a control. As can be seen in FIG. 18B, neither EMT6-Her2 cells nor parental EMT6 cells resulted in tumor growth in the cured mice while EMT6-Her2 cells developed into tumors as expected in the naïve mice. These results suggest that the antibody sialidase conjugates of the present invention are capable of inducing long term memory against tumors. In addition, the long term memory is towards the tumor cell and is independent of the originally targeted cancer antigen (Her2 in this case).

[0364] The results for Groups 1, 5 and 6 (vehicle, anti-mouse PD1 and anti-mouse PD1 combined with Janus) are shown in FIG. 19A and FIG. 19B. While anti-mouse PD1 had good activity with 4 out of 6 mice demonstrating complete regressions (similar to Janus alone with 3 out of 6 mice demonstrating complete regression, see FIG. 18A), the combination of anti-mouse PD1 with Janus demonstrated complete regression of tumor growth in all 6 mice (FIG. 19B). There was no body weight loss in any of the animals given this combination.

### Example 9

[0365] This Example describes the in vivo administration of antibody sialidase conjugates (ASCs) with bacterial sialidases.

[0366] A Janus ASC including Salmonella typhimurium sialidase (St-sialidase) and trastuzumab (including a first polypeptide chain with amino acid sequence SEQ ID NO: 66, encoded by nucleotide sequence SEQ ID NO: 86, a second polypeptide chain with amino acid sequence SEQ ID NO: 67, encoded by nucleotide sequence SEQ ID NO: 87, and a third polypeptide chain with amino acid sequence SEQ ID NO: 90, encoded by nucleotide sequence SEQ ID NO: 91) was made and tested in this Example.

[0367] The ASC was tested in a mouse syngeneic tumor model injected with a B16 melanoma cell line expressing human Her2 (B16D5-Her2, Surana et al. CANCER IMMUNOL RES, 2(11): 1103-1112). Female C57BL/6 mice, 6-8 weeks of age, were inoculated subcutaneously in the right lower flank region with B16D5-Her2 tumor cells (5×10⁵). Mice were randomly allocated to 3 groups when tumors reached approximately 50 to 100 mm³. Treatment groups are described in TABLE 33 with dosing schedule indicated post randomization. Anti-mouse PD1, obtained from BioXcell (RMP1-14, Cat. No. 665418F1) and anti-mouse CTLA4, obtained from BioXcell (9D9, Cat. # BE0164), were used in combination.

TABLE 33

| | | | | Dose | | |
|---|---|---|---|---|---|---|
| | No. of | | Dose | volume | | Schedule |
| Group | Animal | Treatment | (mg/kg) | (μL/g) | Route | (Days) |
| 1 | 6 | Janus | NA | 10 | i.p. | 0, 3, 7, 10 |
| 2 | 6 | Trastuzumab | 10 | 10 | i.p. | 0, 3, 7, 10 |
| 3 | 6 | anti-mouse | 10 | 10 | i.p. | 0, 3, 7, 10 |
| | | CTLA4 | | | | |
| | | anti-mouse | 10 | 10 | i.p. | 0, 3, 7, 10 |
| | | PD1 | | | | |

[0368] The B16 melanoma mouse model is considered a difficult tumor model to treat with immuno-oncology approaches. A comparison of Janus to a combination of anti-mouse PD1 and anti-mouse CTLA4 was carried out. The results are shown in FIG. 20. Anti-mouse PD1 combined with anti-mouse CTLA4 had an impact on B16D5-Her2 tumor growth, but this combination also demonstrated significant weight loss in the treated animals. By comparison, Janus demonstrated a more robust anti-tumor activity with no significant weight loss. Trastuzumab alone demonstrated marginal activity in this model.

### Example 10

[0369] This Example describes the in vivo administration of an antibody sialidase conjugate (ASC) containing a human sialidase.

[0370] Janus Trastuzumab, as described in Example 3, including Neu2 with M1D, V6Y, P62G, A93E, I187K and C332A substitutions and Trastuzumab (including a first polypeptide chain with amino acid sequence SEQ ID NO: 66, encoded by nucleotide sequence SEQ ID NO: 86, a second polypeptide chain with amino acid sequence SEQ ID NO: 67, encoded by nucleotide sequence SEQ ID NO: 87, and a third polypeptide chain with amino acid sequence SEQ ID NO: 68, encoded by nucleotide sequence SEQ ID NO: 88) was made and tested in this Example.

[0371] Janus Trastuzumab was compared to isotype control antibody in a mouse syngeneic tumor model injected with a murine breast cancer cell line stably expressing human HER2 (EMT6-HER2). Female BALB/c mice, 6-8 weeks of age, were inoculated subcutaneously in the right lower flank region with EMT6-HER2 tumor cells (5×10⁵) for tumor development. Mice were randomly allocated to groups of 8 animals each when tumors reached 50-100 mm³, mean ˜75-100 mm³.

[0372] Mice were treated via intraperitoneal injection of 10 mg/kg and tumor volume (mm³) was recorded. FIG. 21 shows individual tumor growth for mice that received treatment with Janus Trastuzumab or control. Significant tumor growth delay was observed following treatment with Janus Trastuzumab in this experiment.

### INCORPORATION BY REFERENCE

[0373] The entire disclosure of each of the patent and scientific documents referred to herein is incorporated by reference for all purposes. Additionally, the entire disclosure of each of U.S. Provisional Patent Application No. 62/870,354, filed Jul. 3, 2019, U.S. Provisional Patent Application No. 62/956,957, filed Jan. 3, 2020, International (PCT) Patent Application No. PCT/US20/40815, filed Jul. 3, 2020, U.S. Provisional Patent Application No. 62/870,348, filed Jul. 3, 2019, U.S. Provisional Patent Application No. 62/956,977, filed Jan. 3, 2020, International (PCT) Patent Application No. PCT/US20/40814, filed Jul. 3, 2020, U.S. Provisional Patent Application No. 62/870,341, filed Jul. 3, 2019, U.S. Provisional Patent Application No. 62/957,041, filed Jan. 3, 2020, and International (PCT) Patent Application No. PCT/US20/40816, filed Jul. 3, 2020, are incorporated by reference for all purposes.

### EQUIVALENTS

[0374] The invention may be embodied in other specific forms without departing from the spirit or essential characteristics thereof. The foregoing embodiments are therefore to be considered in all respects illustrative rather than limiting on the invention described herein. Scope of the invention is thus indicated by the appended claims rather than by the foregoing description, and all changes that come within the meaning and range of equivalency of the claims are intended to be embraced therein.

### SEQUENCE LISTING

SEQ ID NO: 1:
MASLPVLQKESVFQSGAHAYRIPALLYLPGQQSLLAFAEQRASKKDEHAELIVLRRGDYDAP
THQVQWQAQEVVAQARLDGHRSMNPCPLYDAQTGTLFLFFIAIPGQVTEQQQLQTRANVTRL
CQVTSTDHGRTWSSPRDLTDAAIGPAYREWSTFAVGPGHCLQLHDRARSLVVPAYAYRKLHP
IQRPIPSAFCFLSHDHGRTWARGHFVAQDTLECQVAEVETGEQRVVTLNARSHLRARVQAQS
TNDGLDFQESQLVKKLVEPPPQGCQGSVISFPSPRSGPGSPAQWLLYTHPTHSWQRADLGAY
LNPRPPAPEAWSEPVLLAKGSCAYSDLQSMGTGPDGSPLFGCLYEANDYEEIVFLMFTLKQA
FPAEYLPQ
SEQ ID NO: 2:
MEDLRPMATCPVLQKETLFRTGVHAYRIPALLYLKKQKTLLAFAEKRASKTDEHAELIVLRR
GSYNEATNRVKWQPEEVVTQAQLEGHRSMNPCPLYDKQTKTLFLFFIAVPGRVSEHHQLHTK
VNVTRLCCVSSTDHGRTWSPIQDLTETTIGSTHQEWATFAVGPGHCLQLRNPAGSLLVPAYA
YRKLHPAQKPTPFAFCFISLDHGHTWKLGNFVAENSLECQVAEVGTGAQRMVYLNARSFLGA
RVQAQSPNDGLDFQDNRVVSKLVEPPHGCHGSVVAFHNPISKPHALDTWLLYTHPTDSRNRT
NLGVYLNQMPLDPTAWSEPTLLAMGICAYSDLQNMGQGPDGSPQFGCLYESGNYEEIIFLIF
TLKQAFPTVFDAQ
SEQ ID NO: 3:
EDLRP
SEQ ID NO: 4:
MEDLRP
SEQ ID NO: 5:
DKTHTCPPCPAPELLGGPSVFLFPPKPKDTLMISRTPEVTCVVVDVSHEDPEVKFNWYVDGV
EVHNAKTKPREEQYNSTYRVVSVLTVLHQDWLNGKEYKCKVSNKALPAPIEKTISKAKGQPR
EPQVYTLPPSREEMTKNQVSLTCLVKGFYPSDIAVEWESNGQPENNYKTTPPVLDSDGSFFL
YSKLTVDKSRWQQGNVFSCSVMHEALHNHYTQKSLSLSPGK
SEQ ID NO: 6:
ACAGTGGAAAAGTCCGTGGTGTTCAAGGCCGAGGGCGAGCACTTCACCGACCAGAAAGGCAA
TACCATCGTCGGCTCTGGCAGCGGCGGCACCACCAAGTACTTTAGAATCCCCGCCATGTGCA
CCACCAGCAAGGGCACCATTGTGGTGTTCGCCGACGCCAGACACAACACCGCCAGCGATCAG
AGCTTCATCGATACCGCTGCCGCCAGATCTACCGATGGCGGCAAGACCTGGAACAAGAAGAT
CGCCATCTACAACGACCGCGTGAACAGCAAGCTGAGCAGAGTGATGGACCCTACCTGCATCG
TGGCCAACATCCAGGGCAGAGAAACCATCCTGGTCATGGTCGGAAAGTGGAACAACAACGAT
AAGACCTGGGGCGCCTACAGAGACAAGGCCCCTGATACCGATTGGGACCTCGTGCTGTACAA
GAGCACCGATGACGGCGTGACCTTCAGCAAGGTGGAAACAAACATCCACGACATCGTGACCA
AGAACGGCACCATCTCTGCCATGCTCGGCGGCGTTGGATCTGGCCTGCAACTGAATGATGGC
AAGCTGGTGTTCCCCGTGCAGATGGTCCGAACAAAGAATATCACCACCGTGCTGAATACCAG
CTTCATCTACAGCACCGACGGCATCACATGGTCCCTGCCTAGCGGCTACTGTGAAGGCTTTG
GCAGCGAGAACAACATCATCGAGTTCAACGCCAGCCTGGTCAACAACATCCGGAACAGCGGC
CTGCGGAGAAGCTTCGAGACAAAGGACTTCGGAAAGACGTGGACCGAGTTTCCTCCAATGGA
CAAGAAGGTGGACAACCGGAACCACGGCGTGCAGGGCAGCACAATCACAATCCCTAGCGGCA
ACAAACTGGTGGCCGCTCACTCTAGCGCCCAGAACAAGAACAACGACTACACCAGAAGCGAC
ATCAGCCTGTACGCCCACAACCTGTACAGCGGCGAAGTGAAGCTGATCGACGACTTCTACCC
CAAAGTGGGCAATGCCAGCGGAGCCGGCTACAGCTGTCTGAGCTACCGGAAAAATGTGGACA
AAGAAACCCTGTACGTGGTGTACGAGGCCAACGGCAGCATCGAGTTTCAGGACCTGAGCAGA
CATCTGCCCGTGATCAAGAGCTACAAC
SEQ ID NO: 7:
ENDFGLVQPLVTMEQLLWVSGRQIGSVDTFRIPLITATPRGTLLAFAEARKMSSSDEGAKFI
ALRRSMDQGSTWSPTAFIVNDGDVPDGLNLGAVVSDVETGVVFLFYSLCAHKAGCQVASTML
VWSKDDGVSWSTPRNLSLDIGTEVFAPGPGSGIQKQREPRKGRLIVCGHGTLERDGVFCLLS
DDHGASWRYGSGVSGIPYGQPKQENDFNPDECQPYELPDGSVVINARNQNNYHCHCRIVLRS
YDACDTLRPRDVTFDPELVDPVVAAGAVVTSSGIVFFSNPAHPEFRVNLTLRWSFSNGTSWR
KETVQLWPGPSGYSSLATLEGSMDGEEQAPQLYVLYEKGRNHYTESISVAKISV
SEQ ID NO: 8:
MEEVTTCSFNSPLFRQEDDRGITYRIPALLYIPPTHTFLAFAEKRSTRRDEDALHLVLRRGL
RIGQLVQWGPLKPLMEATLPGHRTMNPCPVWEQKSGCVFLFFICVRGHVTERQQIVSGRNAA
RLCFIYSQDAGCSWSEVRDLTEEVIGSELKHWATFAVGPGHGIQLQSGRLVIPAYTYYIPSW
FFCFQLPCKTRPHSLMIYSDDLGVTWHHGRLIRPMVTVECEVAEVTGRAGHPVLYCSARTPN
RCRAEALSTDHGEGFQRLALSRQLCEPPHGCQGSVVSFRPLEIPHRCQDSSSKDAPTIQOSS
PGSSLRLEEEAGTPSESWLLYSHPTSRKQRVDLGIYLNQTPLEAACWSRPWILHCGPCGYSD
LAALEEEGLFGCLFECGTKQECEQIAFRLFTHREILSHLQGDCTSPGRNPSQFKSN
SEQ ID NO: 9:
MRPADLPPRPMEESPASSSAPTETEEPGSSAEVMEEVTTCSFNSPLFRQEDDRGITYRIPAL
LYIPPTHTFLAFAEKRSTRRDEDALHLVLRRGLRIGQLVQWGPLKPLMEATLPGHRTMNPCP
VWEQKSGCVFLFFICVRGHVTERQQIVSGRNAARLCFIYSQDAGCSWSEVRDLTEEVIGSEL
KHWATFAVGPGHGIQLQSGRLVIPAYTYYIPSWFFCFQLPCKTRPHSLMIYSDDLGVTWHHG
RLIRPMVTVECEVAEVTGRAGHPVLYCSARTPNRCRAEALSTDHGEGFQRLALSRQLCEPPH
GCQGSVVSFRPLEIPHRCQDSSSKDAPTIQQSSPGSSLRLEEEAGTPSESWLLYSHPTSRKQ
RVDLGIYLNQTPLEAACWSRPWILHCGPCGYSDLAALEEEGLFGCLFECGTKQECEQIAFRL
FTHREILSHLQGDCTSPGRNPSQFKSN
SEQ ID NO: 10:
MGVPRTPSRTVLFERERTGLTYRVPSLLPVPPGPTLLAFVEQRLSPDDSHAHRLVLRRGTLA
GGSVRWGALHVLGTAALAEHRSMNPCPVHDAGTGTVFLFFIAVLGHTPEAVQIATGRNAARL
CCVASRDAGLSWGSARDLTEEAIGGAVQDWATFAVGPGHGVQLPSGRLLVPAYTYRVDRREC
FGKICRTSPHSFAFYSDDHGRTWRCGGLVPNLRSGECQLAAVDGGQAGSFLYCNARSPLGSR
VQALSTDEGTSFLPAERVASLPETAWGCQGSIVGFPAPAPNRPRDDSWSVGPGSPLQPPLLG
PGVHEPPEEAAVDPRGGQVPGGPFSRLQPRGDGPRQPGPRPGVSGDVGSWTLALPMPFAAPP
QSPTWLLYSHPVGRRARLHMGIRLSQSPLDPRSWTEPWVIYEGPSGYSDLASIGPAPEGGLV
FACLYESGARTSYDEISFCTFSLREVLENVPASPKPPNLGDKPRGCCWPS
SEQ ID NO: 11:
MMSSAAFPRWLSMGVPRTPSRTVLFERERTGLTYRVPSLLPVPPGPTLLAFVEORLSPDDSH
AHRLVLRRGTLAGGSVRWGALHVLGTAALAEHRSMNPCPVHDAGTGTVFLFFIAVLGHTPEA
VQIATGRNAARLCCVASRDAGLSWGSARDLTEEAIGGAVQDWATFAVGPGHGVQLPSGRLLV
PAYTYRVDRRECFGKICRTSPHSFAFYSDDHGRTWRCGGLVPNLRSGECQLAAVDGGQAGSF
LYCNARSPLGSRVQALSTDEGTSFLPAERVASLPETAWGCQGSIVGFPAPAPNRPRDDSWSV
GPGSPLQPPLLGPGVHEPPEEAAVDPRGGQVPGGPFSRLQPRGDGPRQPGPRPGVSGDVGSW
TLALPMPFAAPPQSPTWLLYSHPVGRRARLHMGIRLSQSPLDPRSWTEPWVIYEGPSGYSDL
ASIGPAPEGGLVFACLYESGARTSYDEISFCTFSLREVLENVPASPKPPNLGDKPRGCCWPS
SEQ ID NO: 12:
MASLP
SEQ ID NO: 13:
ASLP
SEQ ID NO: 14:
TVEKSWF
SEQ ID NO: 15:
GDYDAPTHQVQW
SEQ ID NO: 16:
SMDQGSTW
SEQ ID NO: 17:
STDGGKTW
SEQ ID NO: 18:
PRPPAPEA
SEQ ID NO: 19:
QTPLEAAC
SEQ ID NO: 20:
NPRPPAPEA
SEQ ID NO: 21:
SQNDGES
SEQ ID NO: 22:
LSHSLST
SEQ ID NO: 23:
GAGAACGACTTTGGACTGGTGCAGCCTCTGGTCACCATGGAACAGCTGCTGTGGGTTTCCGG
CAGACAGATCGGCAGCGTGGACACCTTCAGAATCCCTCTGATCACCGCCACACCTAGAGGCA
CCCTGCTGGCCTTTGCCGAGGCCAGAAAGATGAGCAGCTCTGACGAGGGCGCCAAGTTTATT
GCCCTGAGGCGGTCTATGGACCAGGGCTCTACATGGTCCCCTACCGCCTTCATCGTGAACGA
TGGCGACGTGCCCGATGGCCTGAATCTGGGAGCTGTGGTGTCCGATGTGGAAACCGGCGTGG
TGTTCCTGTTCTACAGCCTGTGTGCCCACAAGGCCGGTTGTCAGGTGGCCAGCACAATGCTC
GTGTGGTCCAAGGACGACGGCGTGTCCTGGTCTACCCCTAGAAACCTGAGCCTGGACATCGG
CACCGAAGTGTTTGCTCCAGGACCTGGCTCTGGCATCCAGAAGCAGAGAGAGCCCAGAAAGG
GCAGACTGATCGTGTGTGGCCACGGCACCCTTGAGAGAGATGGCGTTTTCTGCCTGCTGAGC
GACGATCATGGCGCCTCTTGGAGATACGGCAGCGGAGTGTCTGGAATCCCTTACGGCCAGCC
TAAGCAAGAGAACGATTTCAACCCCGACGAGTGCCAGCCTTACGAGCTGCCTGATGGCAGCG
TCGTGATCAACGCCCGGAACCAGAACAACTACCACTGCCACTGCCGGATCGTGCTGAGAAGC
TACGACGCCTGCGATACCCTGCGGCCTAGAGATGTGACCTTCGATCCTGAGCTGGTGGACCC
TGTTGTTGCCGCTGGTGCCGTCGTGACATCTAGCGGCATCGTGTTCTTCAGCAACCCTGCTC
ACCCCGAGTTCAGAGTGAATCTGACCCTGCGGTGGTCCTTCAGCAATGGCACAAGCTGGCGG
AAAGAAACCGTGCAGCTTTGGCCTGGACCTAGCGGCTACTCTTCTCTGGCTACACTGGAAGG
CAGCATGGACGGCGAAGAACAGGCCCCTCAGCTGTACGTGCTGTACGAGAAGGGCAGAAACC
ACTAGACCGAGAGCATCAGCGTGGCCAAGATCAGCGTT
SEQ ID NO: 24:
ATGGCCAGCCTGCCTGTGCTGCAGAAAGAAAGCGTGTTCCAGTCTGGCGCCCACGCCTACAG
AATTCCCGCTCTGCTGTATCTGCCAGGCCAGCAGTCTCTGCTGGCTTTCGCTGAACAGCGGG
CCAGCAAGAAGGATGAGCACGCCGAACTGATCGTGCTGCGGAGAGGCGATTACGACGCCCCT
ACACATCAGGTGCAGTGGCAGGCTCAAGAGGTGGTGGCTCAGGCTAGACTGGACGGCCACAG
ATCTATGAACCCCTGTCCTCTGTACGATGCCCAGACCGGCACACTGTTTCTGTTCTTTATCG
CTATCCCCGGCCAAGTGACCGAGCAGCAGCAGCTGCAGACAAGAGCCAACGTGACCAGACTG
TGTCAAGTGACCTCCACCGACCACGGCAGAACCTGGTCTAGCCCTAGAGATCTGACCGACGC
CGCCATCGGACCTGCCTATAGAGAGTGGTCCACCTTCGCCGTTGGACCTGGACACTGTCTCC
AGCTGCACGACAGGGCTAGATCTCTGGTGGTGCCTGCCTACGCCTATAGAAAGCTGCACCCC
ATCCAGCGGCCTATTCCTAGCGCCTTCTGCTTTCTGAGCCACGATCACGGCAGGACATGGGC
CAGAGGACATTTCGTGGCCCAGGACACACTGGAATGCCAGGTGGCCGAAGTGGAAACCGGCG
AGCAGAGAGTCGTGACCCTGAACGCCAGATCTCACCTGAGAGCCAGAGTGCAGGCCCAGAGC
ACAAACGACGGCCTGGATTTCCAAGAGAGCCAGCTGGTCAAGAAACTGGTGGAACCTCCTCC
ACAGGGCTGTCAGGGAAGCGTGATCAGCTTTCCATCTCCTAGAAGCGGCCCTGGCTCTCCTG
CTCAGTGGCTGCTGTATACACACCCCACACACAGCTGGCAGAGAGCCGATCTGGGCGCCTAC
CTGAATCCTAGACCTCCTGCTCCTGAGGCTTGGAGCGAACCTGTTCTGCTGGCCAAGGGCAG
CTGTGCCTACAGCGATCTGCAGTCTATGGGCACAGGCCCTGATGGCAGCCCTCTGTTTGGCT
GTCTGTACGAGGCCAACGACTACGAAGAGATCGTGTTCCTGATGTTCACCCTGAAGCAGGCC
TTTCCAGCCGAGTACCTGCCTCAA
SEQ ID NO: 25:
ATGGAGGAAGTGACCACCTGTAGCTTCAACAGCCCTCTGTTCCGGCAAGAGGACGACCGGGG
CATCACCTACAGAATCCCTGCTCTGCTGTACATCCCTCCTACACACACCTTTCTGGCCTTCG
CCGAGAAGCGGAGCACCAGACGAGATGAAGATGCCCTGCACCTGGTGCTGAGAAGAGGCCTG
AGAATCGGACAGCTGGTGCAGTGGGGACCTCTGAAGCCTCTGATGGAAGCCACACTGCCCGG
CCACAGAACCATGAATCCTTGTCCTGTGTGGGAGCAGAAAAGCGGCTGCGTGTTCCTGTTCT
TCATCTGCGTGCGGGGCCACGTGACCGAGAGACAGCAAATCGTGTCCGGCAGAAACGCCGCC
AGACTGTGCTTCATCTACAGCCAGGATGCCGGCTGCTCTTGGAGCGAAGTTCGGGATCTGAC
CGAAGAAGTGATCGGCAGCGAGCTGAAGCACTGGGCCACATTTGCTGTTGGCCCTGGCCACG
GAATCCAGCTGCAATCTGGCAGACTGGTCATCCCCGCCTACACCTACTATATCCCCAGCTGG
TTCTTCTGCTTCCAACTGCCTTGCAAGACCCGGCCTCACAGCCTGATGATCTACAGCGACGA
TCTGGGCGTGACATGGCACCACGGCAGACTGATCAGACCCATGGTCACCGTGGAATGCGAGG
TGGCCGAAGTGACAGGCAGAGCTGGACACCCTGTGCTGTACTGCTCTGCCAGAACACCCAAC
CGGTGTAGAGCCGAGGCTCTGTCTACAGATCACGGCGAGGGCTTTCAGAGACTGGCCCTCTC
TAGACAGCTGTGCGAACCTCCTCATGGCTGTCAGGGCAGCGTGGTGTCCTTCAGACCTCTGG
AAATCCCTCACCGGTGCCAGGACAGCAGCTCTAAGGATGCCCCTACCATCCAGCAGTCTAGC
CCTGGCAGCAGCCTGAGACTGGAAGAGGAAGCCGGAACACCTAGCGAGAGCTGGCTGCTGTA
CTCTCACCCCACCAGCAGAAAGCAGAGAGTGGACCTGGGCATCTACCTGAATCAGACCCCTC
TGGAAGCCGCCTGTTGGAGCAGACCTTGGATTCTGCACTGTGGCCCTTGCGGCTACTCTGAT
CTGGCCGCTCTGGAAGAAGAGGGCCTGTTCGGCTGCCTGTTTGAGTGCGGCACAAAGCAAGA
GTGCGAGCAGATCGCCTTCCGGCTGTTCACCCACAGAGAGATCCTGAGCCATCTGCAGGGCG
ACTGCACAAGCCCAGGCAGAAATCCCAGCCAGTTCAAGAGCAAC
SEQ ID NO: 26:
ATGGGCGTGCCCAGAACACCCAGCAGAACCGTGCTGTTCGAGAGAGAGAGGACCGGCCTGAC
CTACAGAGTGCCTTCTCTGCTGCCTGTGCCTCCTGGACCTACACTGCTGGCCTTCGTGGAAC
AGAGACTGAGCCCCGATGATTCTCACGCCCACAGACTGGTGCTGAGAAGAGGAACACTGGCT
GGCGGCTCTGTTAGATGGGGAGCACTGCATGTGCTGGGCACAGCTGCTCTTGCCGAGCACAG
ATCCATGAATCCCTGTCCTGTGCACGACGCCGGAACCGGCACAGTGTTTCTGTTCTTTATCG
CCGTGCTGGGCCACACACCTGAGGCCGTTCAAATTGCCACCGGCAGAAATGCCGCCAGACTG
TGTTGTGTGGCCTCCAGAGATGCCGGCCTGTCTTGGGGATCTGCCAGAGATCTGACCGAGGA
AGCCATTGGCGGAGCCGTTCAGGATTGGGCCACATTTGCTGTTGGACCTGGACACGGCGTGC
AGCTGCCAAGTGGTAGACTGCTGGTGCCTGCCTACACATACAGAGTGGATCGGAGAGAGTGC
TTCGGAAAGATCTGCCGGACAAGCCCTCACAGCTTCGCCTTCTACTCCGACGATCACGGCCG
GACTTGGAGATGTGGTGGCCTGGTGCCTAATCTGAGAAGCGGCGAATGTCAACTGGCCGCCG
TTGATGGTGGACAGGCTGGCAGCTTCCTGTACTGCAACGCCAGATCTCCTCTGGGCTCTAGA
GTGCAGGCCCTGTCTACCGATGAGGGCACCAGTTTTCTGCCCGCCGAAAGAGTTGCCTCTCT
GCCTGAAACAGCCTGGGGCTGTCAGGGCTCTATCGTGGGATTTCCTGCTCCTGCTCCAAACA
GACCCCGGGACGATTCTTGGAGTGTCGGCCCTGGATCTCCACTGCAGCCTCCATTGCTTGGA
CCAGGCGTTCACGAGCCACCTGAAGAGGCTGCCGTTGATCCTAGAGGCGGACAAGTTCCTGG
CGGCCCTTTTAGCAGACTGCAGCCAAGAGGCGACGGCCCTAGACAACCTGGACCAAGACCTG
GCGTCAGCGGAGATGTTGGCTCTTGGACACTGGCCCTGCCTATGCCTTTTGCCGCTCCTCCT
CAGTCTCCTACCTGGCTGCTGTACTCTCACCCTGTTGGCAGACGGGCCAGACTGCACATGGG
CATCAGACTGTCTCAGAGCCCTCTGGACCCCAGAAGCTGGACAGAGCCTTGGGTCATCTATG
AGGGCCCTAGCGGCTACAGCGATCTGGCCTCTATTGGCCCAGCTCCTGAAGGCGGACTGGTG
TTCGCTTGTCTGTATGAGAGCGGCGCCAGAACCAGCTACGACGAGATCAGCTTCTGCACCTT
CAGCCTGCGCGAGGTGCTGGAAAATGTGCCCGCCTCTCCTAAGCCTCCTAACCTGGGCGATA
AGCCTAGAGGCTGTTGCTGGCCATCT
SEQ ID NO: 27:
MTGERPSTALPDRRWGPRILGFWGGCRVWVFAAIFLLLSLAASWSKA
SEQ ID NO: 28:
MDMRVPAQLLGLLLLWLPGARC
SEQ ID NO: 29:
YGTL
SEQ ID NO: 30:
MTVEKSVVFKAEGEHFTDQKGNTIVGSGSGGTTKYFRIPAMCTTSKGTIVVFADARHNTASD
QSFIDTAAARSTDGGKTWNKKIAIYNDRVNSKLSRVMDPTCIVANIQGRETILVMVGKWNNN
DKTWGAYRDKAPDTDWDLVLYKSTDDGVTFSKVETNIHDIVTKNGTISAMLGGVGSGLQLND
GKLVFPVQMVRTKNITTVLNTSFIYSTDGITWSLPSGYCEGFGSENNIIEFNASLVNNIRNS
GLRRSFETKDFGKTWTEFPPMDKKVDNRNHGVQGSTITIPSGNKLVAAHSSAQNKNNDYTRS
DISLYAHNLYSGEVKLIDDFYPKVGNASGAGYSCLSYRKNVDKETLYVVYEANGSIEFQDLS
RHLPVIKSYN
SEQ ID NO: 31:
EPKSCDKTHTCPPCPAPELLGGPSVFLFPPKPKDTLMISRTPEVTCVVVDVSHEDPEVKFNW
YVDGVEVHNAKTKPREEQYNSTYRVVSVLTVLHQDWLNGKEYKCKVSNKALPAPIEKTISKA
KGQPREPQVYTLPPSREEMTKNQVSLTCLVKGFYPSDIAVEWESNGQPENNYKTTPPVLDSD
GSFFLYSKLTVDKSRWQQGNVFSCSVMHEALHNHYTQKSLSLSPGK
SEQ ID NO: 32:
DKTHTCPPCPAPELLGGPSVFLFPPKPKDTLMISRTPEVTCVVVDVSHEDPEVKFNWYVDGV
EVHNAKTKPREEQYNSTYRVVSVLTVLHQDWLNGKEYKCKVSNKALPAPIEKTISKAKGQPR
EPQVYTLPPSREEMTKNQVSLTCLVKGFYPSDIAVEWESNGQPENNYKTTPPVLDSDGSFFL
TSKLTVDKSRWQQGNVFSCSVMHEALHNHYTQKSLSLSPGK
SEQ ID NO: 33:
EPKSCDKTHTCPPCPAPELLGGPSVFLFPPKPKDTLMISRTPEVTCVVVDVSHEDPEVKFNW
YVDGVEVHNAKTKPREEQYNSTYRVVSVLTVLHQDWLNGKEYKCKVSNKALPAPIEKTISKA
KGQPREPQVYTLPPSREEMTKNQVSLYCLVKGFYPSDIAVEWESNGQPENNYKTTPPVLDSD
GSFFLYSKLTVDKSRWQQGNVFSCSVMHEALHNHYTQKSLSLSPGK
SEQ ID NO: 34:
ATGAGACCTGCGGACCTGCCCCCGCGCCCCATGGAAGAATCCCCGGCGTCCAGCTCTGCCCC
GACAGAGACGGAGGAGCCGGGGTCCAGTGCAGAGGTCATGGAAGAAGTGACAACATGCTCCT
TCAACAGCCCTCTGTTCCGGCAGGAAGATGACAGAGGGATTACCTACCGGATCCCAGCCCTG
CTCTACATACCCCCCACCCACACCTTCCTGGCCTTTGCAGAGAAGCGTTCTACGAGGAGAGA
TGAGGATGCTCTCCACCTGGTGCTGAGGCGAGGGTTGAGGATTGGGCAGTTGGTACAGTGGG
GGCCCCTGAAGCCACTGATGGAAGCCACACTACCGGGGCATCGGACCATGAACCCCTGTCCT
GTATGGGAGCAGAAGAGTGGTTGTGTGTTCCTGTTCTTCATCTGTGTGCGGGGCCATGTCAC
AGAGCGTCAACAGATTGTGTCAGGCAGGAATGCTGCCCGCCTTTGCTTCATCTACAGTCAGG
ATGCTGGATGTTCATGGAGTGAGGTGAGGGACTTGACTGAGGAGGTCATTGGCTCAGAGCTG
AAGCACTGGGCCACATTTGCTGTGGGCCCAGGTCATGGCATCCAGCTGCAGTCAGGGAGACT
GGTCATCCCTGCGTATACCTACTACATCCCTTCCTGGTTCTTTTGCTTCCAGCTACCATGTA
AAACCAGGCCTCATTCTCTGATGATCTACAGTGATGACCTAGGGGTCACATGGCACCATGGT
AGACTCATTAGGCCCATGGTTACAGTAGAATGTGAAGTGGCAGAGGTGACTGGGAGGGCTGG
CCACCCTGTGCTATATTGCAGTGCCCGGACACCAAACAGGTGCCGGGCAGAGGCGCTCAGCA
CTGACCATGGTGAAGGCTTTCAGAGACTGGCCCTGAGTCGACAGCTCTGTGAGCCCCCACAT
GGTTGCCAAGGGAGTGTGGTAAGTTTCCGGCCCCTGGAGATCCCACATAGGTGCCAGGACTC
TAGCAGCAAAGATGCACCCACCATTCAGCAGAGCTCTCCAGGCAGTTCACTGAGGCTGGAGG
AGGAAGCTGGAACACCGTCAGAATCATGGCTCTTGTACTCACACCCAACCAGTAGGAAACAG
AGGGTTGACCTAGGTATCTATCTCAACCAGACCCCCTTGGAGGCTGCCTGCTGGTCCCGCCC
CTGGATCTTGCACTGTGGGCCCTGTGGCTACTCTGATCTGGCTGCTCTGGAGGAGGAGGGCT
TGTTTGGGTGTTTGTTTGAATGTGGGACCAAGCAAGAGTGTGAGCAGATTGCCTTCCGCCTG
TTTACACACCGGGAGATCCTGAGTCACCTGCAGGGGGACTGCACCAGCCCTGGTAGGAACCC
AAGCCAATTCAAAAGCAAT
SEQ ID NO: 35:
ATGATGAGCTCTGCAGCCTTCCCAAGGTGGCTGAGCATGGGGGTCCCTCGTACCCCTTCACG
GACAGTGCTCTTCGAGCGGGAGAGGACGGGCCTGACCTACCGCGTGCCCTCGCTGCTCCCCG
TGCCCCCCGGGCCCACCCTGCTGGCCTTTGTGGAGCAGCGGCTCAGCCCTGACGACTCCCAC
GCCCACCGCCTGGTGCTGAGGAGGGGCACGCTGGCCGGGGGCTCCGTGCGGTGGGGTGCCCT
GCACGTGCTGGGGACAGCAGCCCTGGCGGAGCACCGGTCCATGAACCCCTGCCCTGTGCACG
ATGCTGGCACGGGCACCGTCTTCCTCTTCTTCATCGCGGTGCTGGGCCACACGCCTGAGGCC
GTGCAGATCGCCACGGGAAGGAACGCCGCGCGCCTCTGCTGTGTGGCCAGCCGTGACGCCGG
CCTCTCGTGGGGCAGCGCCCGGGACCTCACCGAGGAGGCCATCGGTGGTGCCGTGCAGGACT
GGGCCACATTCGCTGTGGGTCCCGGCCACGGTGTGCAGCTGCCCTCAGGCCGCCTGCTGGTA
CCCGCCTACACCTACCGCGTGGACCGCCGAGAGTGTTTTGGCAAGATCTGCCGGACCAGCCC
TCACTCCTTCGCCTTCTACAGCGATGACCACGGCCGCACCTGGCGCTGTGGAGGCCTCGTGC
CCAACCTGCGCTCAGGCGAGTGCCAGCTGGCAGCGGTGGACGGTGGGCAGGCCGGCAGCTTC
CTCTACTGCAATGCCCGGAGCCCACTGGGCAGCCGTGTGCAGGCGCTCAGCACTGACGAGGG
CACCTCCTTCCTGCCCGCAGAGCGCGTGGCTTCCCTGCCCGAGACTGCCTGGGGCTGCCAGG
GCAGCATCGTGGGCTTCCCAGCCCCCGCCCCCAACAGGCCACGGGATGACAGTTGGTCAGTG
GGCCCCGGGAGTCCCCTCCAGCCTCCACTCCTCGGTCCTGGAGTCCACGAACCCCCAGAGGA
GGCTGCTGTAGACCCCCGTGGAGGCCAGGTGCCTGGTGGGCCCTTCAGCCGTCTGCAGCCTC
GGGGGGATGGCCCCAGGCAGCCTGGCCCCAGGCCTGGGGTCAGTGGGGATGTGGGGTCCTGG
ACCCTGGCACTCCCCATGCCCTTTGCTGCCCCGCCCCAGAGCCCCACGTGGCTGCTGTACTC
CCACCCAGTGGGGCGCAGGGCTCGGCTACACATGGGTATCCGCCTGAGCCAGTCCCCGCTGG
ACCCGCGCAGCTGGACAGAGCCCTGGGTGATCTACGAGGGCCCCAGCGGCTACTCCGACCTG
GCGTCCATCGGGCCGGCCCCTGAGGGGGGCCTGGTTTTTGCCTGCCTGTACGAGAGCGGGGC
CAGGACCTCCTATGATGAGATTTCCTTTTGTACATTCTCCCTGCGTGAGGTCCTGGAGAACG
TGCCCGCCAGCCCCAAACCGCCCAACCTTGGGGACAAGCCTCGGGGGTGCTGCTGGCCCTCC
SEQ ID NO: 36:
MRFKNVKKTALMLAMFGMATSSNAALFDYNATGDTEFDSPAKQGWMQDNTNNGSGVLTNADG
MPAWLVQGIGGRAQWTYSLSTNQHAQASSFGWRMTTEMKVLSGGMITNYYANGTQRVLPIIS
LDSSGNLVVEFEGQTGRTVLATGTAATEYHKFELVFLPGSNPSASFYFDGKLIRDNIQPTAS
KQNMIVWGNGSSNTDGVAAYRDIKFEIQGDVIFRGPDRIPSIVASSVTPGVVTAFAEKRVGG
GDPGALSNTNDIITRTSRDGGITWDTELNLTEQINVSDEFDFSDPRPIYDPSSNTVLVSYAR
WPTDAAQNGDRIKPWMPNGIFYSVYDVASGNWQAPIDVTDQVKERSFQIAGWGGSELYRRNT
SLNSQQDWQSNAKIRIVDGAANQIQVADGSRKYVVTLSIDESGGLVANLNGVSAPIILQSEH
AKVHSFHDYELQYSALNHTTTLFVDGQQITTWAGEVSQENNIQFGNADAQIDGRLHVQKIVL
TQQGHNLVEFDAFYLAQQTPEVEKDLEKLGWTKIKTGNTMSLYGNASVNPGPGHGITLTRQQ
NISGSQNGRLIYPAIVLDRFFLNVMSIYSDDGGSNWQTGSTLPIPFRWKSSSILETLEPSEA
DMVELQNGDLLLTARLDFNQIVNGVNYSPRQQFLSKDGGITWSLLEANNANVFSNISTGTVD
ASITRFEQSDGSHFLLFTNPQGNPAGTNGRQNLGLWFSFDEGVTWKGPIQLVNGASAYSDIY
QLDSENAIVIVETDNSNMRILRMPITLLKQKLTLSQN
SEQ ID NO: 37:
TTGTCAATCAAGATGAGTTCACAACGAAGAAGAGCATCGATTCACAAGGAAACAGATTCTAA
TATAAAGGGAGTAGATATGCGTTTCAAAAACGTAAAGAAAACCGCTTTAATGCTTGCAATGT
TCGGTATGGCGACAAGCTCAAACGCCGCACTTTTTGACTATAACGCAACGGGTGACACTGAG
TTTGACAGTCCAGCCAAACAGGGATGGATGCAAGACAACACGAATAATGGCAGCGGCGTTTT
AACCAATGCAGATGGAATGCCCGCTTGGTTGGTGCAAGGTATTGGAGGGAGAGCTCAATGGA
CATATTCTCTCTCTACTAATCAACATGCCCAAGCATCAAGTTTCGGTTGGCGAATGACGACA
GAAATGAAAGTGCTCAGTGGTGGAATGATCACAAACTACTACGCCAACGGCACTCAGCGTGT
CTTACCCATCATTTCATTAGATAGCAGTGGTAACTTAGTTGTTGAGTTTGAAGGGCAAACTG
GACGCACCGTTTTGGCAACCGGCACAGCAGCAACGGAATATCATAAATTTGAATTGGTATTC
CTTCCTGGAAGTAACCCATCCGCTAGCTTTTACTTCGATGGCAAACTCATTCGTGACAACAT
CCAGCCGACTGCATCAAAACAAAATATGATCGTATGGGGGAATGGCTCATCAAATACGGATG
GTGTCGCCGCTTATCGTGATATTAAGTTTGAAATTCAAGGCGACGTCATCTTCAGAGGCCCA
GACCGTATACCGTCCATTGTAGCAAGTAGCGTAACACCAGGGGTGGTAACCGCATTTGCAGA
GAAACGTGTGGGGGGAGGAGATCCCGGTGCTCTGAGTAATACCAATGACATAATCACTCGTA
CCTCACGAGATGGCGGTATAACTTGGGATACCGAGCTCAACCTCACTGAGCAAATCAATGTC
AGTGATGAGTTTGATTTCTCCGATCCTCGGCCTATCTATGATCCTTCCTCCAATACGGTTCT
TGTCTCTTATGCTCGATGGCCGACCGATGCCGCTCAAAACGGAGATCGAATAAAACCATGGA
TGCCAAACGGTATTTTTTACAGCGTCTATGATGTTGCATCAGGGAACTGGCAAGCGCCTATC
GATGTTACCGATCAGGTGAAAGAACGCAGTTTCCAAATCGCTGGTTGGGGTGGTTCAGAGCT
GTATCGCCGAAATACCAGCCTAAATAGCCAGCAAGACTGGCAATCAAACGCTAAGATCCGAA
TTGTTGATGGTGCAGCGAACCAGATACAAGTTGCCGATGGTAGCCGAAAATATGTTGTCACA
CTGAGTATTGATGAATCAGGTGGTCTAGTCGCTAATCTAAACGGTGTTAGTGCTCCGATTAT
CCTGCAATCTGAACACGCAAAGGTACACTCTTTCCATGACTACGAACTTCAATATTCGGCGT
TAAACCACACCACAACGTTATTCGTGGATGGTCAGCAAATCACAACTTGGGCTGGCGAAGTA
TCGCAGGAGAACAACATTCAGTTTGGTAATGCGGATGCCCAAATTGACGGCAGACTGCATGT
GCAAAAAATTGTTCTCACACAGCAAGGCCATAACCTCGTGGAGTTTGATGCTTTCTATTTAG
CACAGCAAACCCCTGAAGTAGAGAAAGACCTTGAAAAGCTTGGTTGGAGAAAAATTAAAACG
GGCAACACCATGAGTTTGTATGGAAATGCCAGTGTCAACCCAGGACCGGGTCATGGCATCAC
CCTTACTCGACAACAAAATATCAGTGGCAGCCAAAACGGCCGCTTGATCTACCCAGCGATTG
TGCTTGATCGTTTCTTCTTGAACGTCATGTCTATTTACAGTGATGATGGCGGTTCAAACTGG
CAAACCGGTTCAACACTCCCTATCCCCTTTCGCTGGAAGAGTTCGAGTATCCTAGAAACTCT
CGAACCTAGTGAAGCTGATATGGTTGAACTCCAAAACGGTGATCTACTCCTTACTGCACGCC
TTGATTTTAACCAAATCGTTAATGGTGTGAACTATAGCCCACGCCAGCAATTTTTGAGTAAA
GATGGTGGAATCACGTGGAGCCTACTTGAGGCTAACAACGCTAACGTCTTTAGCAATATCAG
TACTGGTACCGTTGATGCTTCTATTACTCGGTTCGAGCAAAGTGACGGTAGCCATTTCTTAC
TCTTTACTAACCCACAAGGAAACCCTGCGGGGACAAATGGCAGGCAAAATCTAGGCTTATGG
TTTAGCTTCGATGAAGGGGTGACATGGAAAGGACCAATTCAACTTGTTAATGGTGCATCGGC
ATATTCTGATATTTATCAATTGGATTCGGAAAATGCGATTGTCATTGTTGAAACGGATAATT
CAAATATGCGAATTCTTCGTATGCCTATCACATTGCTAAAACAGAAGCTGACCTTATCGCAA
AACTAA
SEQ ID NO: 38:
MVGADPTRPRGPLSYWAGRRGQGLAAIFLLLVSAAESEARAEDDFSLVQPLVTMEQLLWVSG
KQIGSVDTFRIPLITATPRGTLLAFAEARKKSASDEGAKFIAMRRSTDQGSTWSSTAFIVDD
GEASDGLNLGAVVNDVDTGIVFLIYTLCAHKVNCQVASTMLVWSKDDGISWSPPRNLSVDIG
TEMFAPGPGSGIQKQREPGKGRLIVCGHGTLERDGVFCLLSDDHGASWHYGTGVSGIPFGQP
KHDHDFNPDECQPYELPDGSVIINARNQNNYHCRCRIVLRSYDACDTLRPRDVTFDPELVDP
VVAAGALATSSGIVFFSNPAHPEFRVNLTLRWSFSNGTSWLKERVQVWPGPSGYSSLTALEN
STDGKKQPPQLFVLYEKGLNRYTESISMVKISVYGTL
SEQ ID NO: 39:
MTVQPSPWFSDLRPMATCPVLQKETLFRTGVHAYRIPALLYLKKQKTLLAFAEKRASKTDEH
AELIVLRRGSYNEATNRVKWQPEEVVTQAQLEGHRSMNPCPLYDKQTKTLFLFFIAVPGRVS
EHHQLHTKVNVTRLCCVSSTDHGRTWSPIQDLTETTIGSTHQEWATFAVGPGHCLQLRNPAG
SLLVPAYAYRKLHPAQKPTPFAFCFISLDHGHTWKLGNFVAENSLECQVAEVGTGAQRMVYL
NARSFLGARVQAQSPNDGLDFQDNRVVSKLVEPPHGCHGSVVAFHNPISKPHALDTWLLYTH
PTDSRNRTNLGVYLNQMPLDPTAWSEPTLLAMGICAYSDLQNMGQGPDGSPQFGCLYESGNY
EEIIELIFTLKQAFPTVFDAQ
SEQ ID NO: 40:
MEEVPPYSLSSTLFQQEEQSGVTYRIPALLYLPPTHTFLAFAEKRTSVRDEDAACLVLRRGL
MKGRSVQWGPQRLLMEATLPGHRTMNPCPVWEKNTGRVYLFFICVRGHVTERCQIVWGKNAA
RLCFLCSEDAGCSWGEVKDLTEEVIGSEVKRWATFAVGPGHGIQLHSGRLIIPAYAYYVSRW
FLCFACSVKPHSLMIYSDDFGVTWHHGKFIEPQVTGECQVAEVAGTAGNPVLYCSARTPSRF
RAEAFSTDSGGCFQKPTLNPQLHEPRTGCQGSVVSFRPLKMPNTYQDSIGKGAPATQKCPLL
DSPLEVEKGAETPSATWLLYSHPTSKRKRINLGIYYNRNPLEVNCWSRPWILNRGPSGYSDL
AVVEEQDLVACLFECGEKNEYERIDFCLFSDHEVLSCEDCTSPSSD
SEQ ID NO: 41:
METAGAPFCFHVDSLVPCSYWKVMGPTRVPRRTVLFQRERTGLTYRVPALLCVPPRPTLLAF
AEQRLSPDDSHAHRLVLRRGTLTRGSVRWGTLSVLETAVLEEHRSMNPCPVLDEHSGTIFLF
FIAVLGHTPEAVQIATGKNAARLCCVTSCDAGLTWGSVRDLTEEAIGAALQDWATFAVGPGH
GVQLRSGRLLVPAYTYHVDRRECFGKICWTSPHSLAFYSDDHGISWHCGGLVPNLRSGECQL
AAVDGDFLYCNARSPLGNRVQALSADEGTSFLPGELVPTLAETARGCQGSIVGFLAPPSIEP
QDDRWTGSPRNTPHSPCFNLRVQESSGEGARGLLERWMPRLPLCYPQSRSPENHGLEPGSDG
DKTSWTPECPMSSDSMLQSPTWLLYSHPAGRRARLHMGIYLSRSPLDPHSWTEPWVIYEGPS
GYSDLAFLGPMPGASLVFACLFESGTRTSYEDISFCLFSLADVLENVPTGLEMLSLRDKAQG
HCWPS
SEQ ID NO: 42:
GGGTCACATGCTGATGGACTAATTGGAGTCGCGGCAGCGCGGGCTGCGGCCCCCAAGGGGAG
GGGTCGGAGTGACGTGCGCGCTTTTAAAGGGCCGAGGTCAGCTGACGGCTTGCCACCGGTGA
CCAGTTCCTGGACAGGGATCGCCGGGAGCTATGGTGGGGGCAGACCCGACCAGACCCCGGGG
ACCGCTGAGCTATTGGGCGGGCCGTCGGGGTCAGGGGCTCGCAGCGATCTTCCTGCTCCTGG
TGTCCGCGGCGGAATCCGAGGCCAGGGCAGAGGATGACTTCAGCCTGGTGCAGCCGCTGGTG
ACCATGGAGCAGCTGCTGTGGGTGAGCGGGAAGCAGATCGGCTCTGTAGACACTTTCCGCAT
CCCGCTCATCACAGCCACCCCTCGGGGCACGCTCCTGGCCTTCGCTGAGGCCAGGAAAAAAT
CTGCATCCGATGAGGGGGCCAAGTTCATCGCCATGAGGAGGTCCACGGACCAGGGTAGCACG
TGGTCCTCTACAGCCTTCATCGTAGACGATGGGGAGGCCTCCGATGGCCTGAACCTGGGCGC
TGTGGTGAACGATGTAGACACAGGGATAGTGTTCCTTATCTATACCCTCTGTGCTCACAAGG
TCAACTGCCAGGTGGCCTCTACCATGTTGGTTTGGAGTAAGGACGACGGCATTTCCTGGAGC
CCACCCCGGAATCTCTCTGTGGATATTGGCACAGAGATGTTTGCCCCTGGACCTGGCTCAGG
CATTCAGAAACAGCGGGAGCCTGGGAAGGGCCGGCTCATTGTGTGTGGACACGGGACGCTGG
AGCGAGATGGGGTCTTCTGTCTCCTCAGTGATGACCACGGTGCCTCCTGGCACTACGGCACT
GGAGTGAGCGGCATTCCCTTTGGCCAGCCCAAACACGATCACGATTTCAACCCCGACGAGTG
CCAGCCCTACGAGCTTCCAGATGGCTCGGTCATCATCAACGCCCGGAACCAGAATAACTACC
ATTGCCGCTGCAGGATCGTCCTCCGCAGCTATGACGCCTGTGACACCCTCAGGCCCCGGGAT
GTGACCTTCGACCCTGAGCTCGTGGACCCTGTGGTAGCTGCAGGAGCACTAGCCACCAGCTC
CGGCATTGTCTTCTTCTCCAATCCAGCCCACCCTGAGTTCCGAGTGAACCTGACCCTGCGCT
GGAGTTTCAGCAATGGTACATCCTGGCAGAAGGAGAGGGTCCAGGTGTGGCCGGGACCCAGC
GGCTACTCGTCCCTGACAGCCCTGGAAAACAGCACGGATGGAAAGAAGCAGCCCCCGCAGCT
GTTCGTTCTGTACGAGAAAGGCCTGAACCGGTACACCGAGAGCATCTCCATGGTCAAAATCA
GCGTCTACGGCACGCTCTGAGCCCCGTGCCCAAAGGACACCAAGTCCTGGTCGCTGACTTCA
CAGCTCTCTGGACCATCTGCAGAGGGTGCCTGAAACACAGCTCTTCCTCTGAACTCTGACCT
TTTGCAACTTCTCATCAACAGGGAAGTCTCTTCGTTATGACTTAACACCCAGCTTCCTCTCG
GGGCAGGAAGTCCCTCCGTCACCAAGAGCACTTTTTTCCAGTATGCTGGGGATGGCCCCTGT
CCATTCTCTTCCAGGACAACGGAGCTGTGCCTTTCTGGGACAGGATGGGGGAGGGGCTCCCC
CTGGAGAGATGAACAGATACGAACTCAGGGAACTGAGAAGGCCCGGTGTCCTAGGGTACAAA
GGCAGGTACTAGATGTGATTGCTGAAAGTCCCCAGGGCAGAGTGTCCTTTCAGAGCAAGGAT
AAGCACACCTACGTGTGCACCTTTGATTATTTATGAATCGAAATATTTGTAACTTAAAATTT
TTGATGCAGAAAAAGCGTTTGTGGAGTCTGTGGTTCTGTCTGCTCACGCCTTCCCAATTGCC
TCCTGGAGAGACAGGAAGGCAGCTGGAAGAGGAGCCGATGTACTTACTGGGAAGCAGAAACC
CCTAGATTCCATCCTGGCTGCTGCTGTTTGCAAGTGTCAAAGATGGGGGGGCGTGTTTATAT
TTTATATTTCTAAGATGGGGTGGCATAGGAAATAGGGAACAGATGTGTAAAACCAGATGGGA
AGGACAGTCTGTGAGAAAGGAGCAAGCAGTTGCTGCAGGTGTGGGAGAGCAAAGCCCTTCTC
CACGTGGAAAGAGCCCAGATGGACGCTAAGCATGTTGGGCACCTGTAACCCCGCACTCGCTG
GACTGACGGTGTAGCTCAGTGGTGGAGCTAGTACTTGGAACGCCTAAGACTCTGGGTTCAGT
CCTTGGGGGGGGGGGTATGTGTTTATTGAGAGGAAGGTGTACGTACTGTAGGTCAGAGGACA
GCTTACTGGAGTTGTCTCTCTCCTTCACGCTGTGAGTCCTGTGGAATGACCTCAGGTGTCAG
AGTTGGGGGCAGGTGCCTTTGCCAGCTGAGCCATCTTGCTGTCTCTGCTTTAATTTAAAAAA
AAAAAAAAAAAAGAATATTAAGGTCTGAGGGATTCGGGCTGCGTTCATTTCAATTAGAGGGT
CATATTTCTTTTGACATTTCTTCTCTAAGAAATGTTAAGATCATTTGTTCTGTGTGATAGAG
GTATAGCTCCATTGTATGTCAGCAGTGAGGGATCCTGTGCATTTTATCCAGAGTTTGTACGG
TGTTCTAGGGGCTGCTAGTGCAGCCCAGTGCTAAACACTTCAGCATGCACAAGGCCTCAATC
AGTGCATGCATGTGCACACACACACAGACACACACGTAGACACTGACACAGGTACACAAATA
CACACTGGCCCACATGTACACATCGACTCACAGGTAGACAGACCCACTTTGACACACATATA
CACAGACACAAACGCACTGGCACACACATATACACAGGCACACATGGATAGATGGACACACG
TGTAGACATACACACACACACAGAAATACAAATGTTCAGGTTTTCTAAAAAAAAAAAAATTA
GAGACGTGTTGACTTCATTTTTAGCAAAAATCCTGTCATGTATCTTAAAGTGGATTGAACCC
ACTATGTAGCCCAGGCTGGCCTCCAAATGGGCATCCTTCTGCCTCAGTCTCCCGAGGGCTAG
GATAACAGGAGTATGCCATCACACCTGGCTAATAGAAATTTTCAAAATTGTTTGTTTGAAGG
TGACTCTTACTATATTGCCTAACTGATCTCCAGTTCGTGAAATCCTCCTGCCTCAGAACCAG
GACTGTCAATATAACCCACCAAGACAGGCCAACATTCACAATTGATTGTTAGTTTGTGGTCT
GAATCAAGGTCTTATACTGTAGCCCAGGCTAGCCCGGAATACACGATATCTCCAGTGCTTCA
GATCCTCAGTTCTAACTAAGCATGGCCACATCCATGTTTAACTGCAAATTTGATGTTACCAT
GGTTTGGTTTGGTTTGGTTTGGTTTGGTTTGGTTTGGTTTGGTTTTTTGGCCATTTTTTTTT
TCTCATGCTGAGGCCTTGTGCTCTCAAGTTGGGGAGACAGCATGGAGGGTAGCTGCAACTGT
AACCCCAGTTCCAGGGGACCTGACACCCTCTGGCCTCCACAAGTATTAGGCACATCTGTGGT
GCACAGACATACAATCAGGCAAAATATTCATACACATAAAATAAAATAATTTAAAACAAAAG
CAAAAATCAGGACCTAAGAAAAAAATCTATTCCTGATTCTTTTATGTTTTGTTTGTATTTTA
TCAAGACAGGGTTGTTTCTCTGTATAGCCCTGGCTGTCTTGGAATTCACTCTGTAGACCAGG
CTGGCCTCAAACTCAGAAATCCTCCTGCCTTTGCCTTCCAAGTGCTGGAATTAAAGGCATGC
GCCACC
SEQ ID NO: 43:
GACATGACCCAAACGGCCCCTGGCTGCAAGGTAATATCGGAAGTTGACTAAGAATGGACGCC
CCACCACTGACTGACCCGCCCCCTGAGTCTGAGATTGGACTTGTCTCTGGATACAGTCATAC
TTTGAGGTACTAGAAGTTAGAAACTGTTAGGTTACTCAGTTCAGTCCATGACAGTCCAACCT
TCTCCATGGTTTTCCGATCTCAGGCCCATGGCGACCTGCCCTGTCCTGCAGAAGGAGACACT
GTTCCGCACAGGCGTCCATGCTTACAGAATCCCTGCTCTGCTCTACCTGAAGAAGCAGAAGA
CCCTGCTGGCCTTTGCGGAAAAGCGAGCCAGCAAGACGGATGAGCACGCAGAGTTGATTGTC
CTGAGAAGAGGAAGCTACAACGAAGCCACCAACCGTGTCAAGTGGCAGCCTGAGGAAGTGGT
GACCCAAGCCCAGCTGGAAGGCCACCGCTCCATGAATCCATGTCCCTTGTATGACAAGCAAA
CAAAGACCCTCTTCCTTTTCTTCATCGCTGTCCCTGGGCGTGTATCAGAACATCATCAGCTC
CACACTAAGGTTAATGTCACACGGCTGTGCTGTGTCAGCAGCACTGACCATGGGAGGACCTG
GAGCCCCATCCAGGACCTCACAGAGACCACCATTGGCAGCACTCATCAGGAATGGGCCACAT
TTGCTGTGGGTCCTGGGCATTGTCTGCAGCTGCGGAACCCAGCTGGGAGCCTGCTGGTACCT
GCTTATGCCTACCGGAAACTGCACCCTGCTCAGAAGCCTACCCCCTTTGCCTTCTGCTTCAT
CAGCCTTGACCATGGGCACACATGGAAACTAGGCAACTTTGTGGCTGAAAACTCACTGGAGT
GCCAGGTGGCTGAGGTTGGCACTGGAGCTCAGAGGATGGTATATCTCAATGCTAGGAGCTTC
CTGGGAGCCAGGGTCCAGGCACAAAGTCCTAATGATGGTCTGGATTTCCAGGACAACCGGGT
AGTGAGTAAGCTTGTAGAGCCCCCCCACGGGTGTCATGGAAGTGTGGTTGCCTTCCACAACC
CCATCTCTAAGCCACATGCCTTAGACACATGGCTTCTTTATACACACCCTACAGACTCCAGG
AATAGAACCAACCTGGGTGTGTACCTAAACCAGATGCCACTAGATCCCACAGCCTGGTCAGA
GCCCACCCTGCTGGCCATGGGCATCTGTGCCTACTCAGACTTACAGAACATGGGGCAAGGCC
CTGATGGCTCCCCACAGTTTGGGTGTCTGTATGAATCAGGTAACTATGAAGAGATCATTTTC
CTCATATTCACCCTGAAGCAAGCTTTCCCCACTGTATTTGATGCCCAGTGATCTCAGTGCAC
GTGGCCCAAAGGGCTTCCTTGTGCTTCAAAACACCCATCTCTCTTTGCTTCCAGCATCCTCT
GGACTCTTGAGTCCAGCTCTTGGGTAACTTCCTCAGGAGGATGCAGAGAATTTGGTCTCTTG
ACTCTCTGCAGGCCTTATTGTTTCAGCCTCTGGTTCTCTTTTCAGCCCAGAAATCAAAGGAG
CCTGGCTTTCCTCAGCCTGTTGGCAGGGCAGGTGGGGACAGTATATATAGAGGCTGCCATTC
TGCATGTCGGTTGTCACTATGCTAGTTTAACCTGCCTGTTTCCCCATGCCTAGTGTTTGAAT
GAGTATTAATAAAATATCCAACCGAGCCCATTTCTTCCTGGAAAAAAA
SEQ ID NO: 44:
ACTGCGCGGTGAAGGGGCGTGGCCTGGCCGGGGAGGTTGACACCCAGACGCTGCTCTCAGTC
CTCTGGCGCCTGCTCCCCAGCGCATTCCTTCTGCTCCTGGGATATTTGTCTCATTACTGCCA
GTTCTTGCGCAGCGGTCACTGGGTTCGTTTCAGCGTCTGTGGTTTCTGTCGCTGTTATCCAG
TCTCCATCGCCCCAGCTCAGCTTCAGGCCTTCTTCCGAGACTCCACGGGAGAGCCCAGAGAG
CCTCCGGAGCCGAAGCCATGGAGGAAGTCCCACCCTACTCCCTCAGCAGCACCCTGTTCCAG
CAGGAAGAACAGAGTGGGGTGACCTACCGGATCCCAGCCCTGCTGTACCTTCCTCCCACCCA
CACCTTCCTGGCCTTTGCAGAGAAGCGGACCTCAGTCAGAGATGAGGATGCTGCCTGCCTGG
TGCTCAGACGAGGGCTGATGAAGGGGCGCTCTGTACAGTGGGGCCCCCAACGGCTACTGATG
GAGGCCACATTACCTGGGCATCGCACCATGAACCCCTGCCCTGTGTGGGAGAAAAATACTGG
CCGTGTGTACCTGTTTTTCATCTGTGTGCGGGGCCATGTTACTGAGAGGTGCCAGATTGTGT
GGGGCAAAAATGCCGCCCGTCTCTGCTTCCTTTGCAGTGAAGATGCCGGCTGCTCTTGGGGT
GAAGTGAAAGACTTGACCGAGGAGGTCATTGGCTCAGAGGTGAAGCGCTGGGCCACATTTGC
TGTGGGCCCAGGTCATGGCATCCAGCTACACTCGGGAAGGCTGATCATCCCCGCCTATGCCT
ACTATGTCTCACGTTGGTTTCTCTGCTTTGCGTGTTCAGTCAAGCCCCATTCCCTGATGATC
TACAGTGATGACTTTGGAGTCACATGGCACCATGGCAAGTTCATTGAGCCCCAGGTGACAGG
GGAGTGCCAAGTGGCCGAAGTGGCTGGGACGGCTGGTAACCCTGTGCTCACTGCAGTGCCCG
AACACCAAGCCGATTTCGAGCAGAGGCTTTTAGTACTGATAGTGGTGGCTGCTTTCAGAAGC
CAACCCTGAACCCACAACTCCATGAGCCTCGAACCGGCTGCCAAGGTAGTGTAGTGAGCTTC
CGGCCTTTGAAGATGCCAAATACCTATCAAGACTCAATTGGCAAAGGTGCTCCCGCTACTCA
GAAGTGCCCTCTGCTGGACAGTCCTCTGGAGGTGGAGAAAGGAGCTGAAACACCATCAGCAA
CATGGCTCTTGTACTCACATCCAACTAGCAAGAGGAAGAGGATTAACCTAGGCATCTACTAC
AACCGGAACCCCTTGGAGGTGAACTGCTGGTCCCGCCCGTGGATCTTGAACCGTGGGCCCAG
TGGCTACTCTGATCTGGCTGTTGTGGAAGAACAGGACTTGGTGGCGTGTTTGTTTGAGTGTG
GGGAGAAGAATGAGTATGAGCGGATTGACTTCTGTCTGTTTTCAGACCATGAGGTCCTGAGC
TGTGAAGACTGTACCAGCCCTAGTAGCGACTAAAGCCAAATCAAGACGGATGAGTGAGGCCC
AGCTTCCCACAGAAAGGAATGGCAGCTACAGCCAGGGTAACAGAGGTCTCTGATGTCTAGAG
AAAACTCTAAAAACTAATAATCTGCTCCTTGAATTTTTTCACTTTTCCCTTCAATGAGCATG
GTGAAAATTGTGCCATATCTTACATAACGAGGCTCTTGAACTGGGAGTTTGAATCTCTTCTC
TTCCCATTAAAAGGAGAGGCCATGTGCTCGCTTCGCGTTCGACAAAGCCTGGATTCTGATCT
TGAGTGGAAGCCACAGGCTTGTCTTTTCCAATGGTTCACTGCTCACCTGAGTATTAGGTGAT
GTGTAGGTGCCTTGGCCAGAAGAAAGATCTGTGTTGTTGTATTTTTTTAAATTTATTTATTT
ACTATATGTAAGTAGACTGCAGCTGTCTTCAGACACACCAGAAGAGGGCGTCAGATCTCATT
AGAGATGGTTGTGAGCCACCATGTGGTTGCTGGGATTTGAACTCAGGACCTTCAGAAGAGCA
GTCAGTGCTCTTAACTACTGAGCCATCTCTCAAGCCCCGCATTGCTGTATTTTTAATAAGAA
AAATGCCCTTATCCTTCCAATAATGCCTGGAGCTGTACAAATTCTCTGTCTTAGAAGACTTG
AGAAAGCAGAACTGTAAGGTCAGATGCTTTCTCCAGCCTTGATGCTGTGTTCCACCTTCCCT
TCCTCATCCAGAAAACAGTTACTAGGGAGAAAATGAGAAACCCATGCCAGCTGCCCTTGATG
ATGGTTGATAACGGTGCTTATTGCTTTTGATGTCATTACCTCTGTTAGAGATGAATCAGAGT
CAGAGGTCCTTAGCTGCATCCACCCATTTCCAGGGGGACATTCTAACACTGCTGAACAGTCA
GCTAAAATGAGAGCTGTGTGTCCTAGCCTGATTCCAGGTTAGTCATGATGCTTCCTGGAGCT
GGGCTTTTATCTAATCCCAGGAGCCATCTAGGGGAGGCTCAGAGCTAGCAGGTGATCTTCCT
GAGATGGTTTCACCGTGACAGGTGAACCATGAGCCCTTCCAAGCAAGGCCAAAGGACAACAT
TATAGGAAAGATTTCTAGTATTAATATGCCTTTTCTCTGTGTGTGTACTGTCTTGTAGTGAT
GCTATATAGACAAATAGATGATTTCTTATTTTTTGTTTGTTTGTTTGTTTTTTTGTTTTTCT
GTAGCCCTAGCTGTCCTGGAACTCACTTTGTAAACCAGGCTGGCCTCGATCTCAGAAATCCG
CCTGCCTCTGCCTCCCGAGTGCTGGGATTAAAGGTGTGCACCACCACACCTTAATGATGATC
CTATAAGTATTCCTAAAATTATACTAGTAATTATTAACTCCTTTATAATAGGACTGCTATTA
AAGCCCTCGCTGATATGAAAACTAGAGTGAGAACTCTGCGAGTCTTCACATGTCATAATTAC
TTCTGAGATAGAAAGCAGGCATTTACAACTTAGAACACATTTCTTAGAGCTGTAAAACAATT
AACTAGAGGTCATAAAAGGGAATGAAAGATTTATTGTAGGTGCTAGGACAGAACATAAAATA
TTGACTGGGCTTATCTATATGAAACTTCATTGTTAACTTTTACACAAGAATTATGGTTTTTA
ACTTTCAGTGAACCTGCGGAGCTAGTGACAGAAGAGAAATGTCTAGTTAGATAACTACTCTT
AATGGAAATTCACATAAACATCTGTTGCCATCTTCTTTTTGAATTTATGTTTAAACTTGTGA
ATGTTTGAATTAGACACTACGCGAGCACATAGAAAATAAAGAACTAAGCGTGAA
SEQ ID NO: 45:
GGACAGTGTGCATCACGGAGCTTGTGGCCCAGACTGTGCCTGGCAGACCCAGAGGACCTAAG
GCTTGGCTCTAGTGGTGGTCAGCACAGCCCTCGGTGGTCTGCGGAGCCTGATATTGCTTTAC
GTAAGGGCTGTTCTGCTGTGCATCTCCTGTGTCTGAAGCTATTCGCCATGGAGACTGCTGGA
GCTCCCTTCTGCTTCCATGTGGACTCCCTGGTACCTTGCTCCTACTGGAAGGTTATGGGGCC
CACGCGTGTTCCCAGGAGAACGGTGCTCTTCCAGAGGGAAAGGACGGGCCTGACCTACCGTG
TGCCTGCGTTACTCTGTGTGCCTCCCAGGCCTACTCTGCTGGCCTTCGCGGAACAGCGACTT
AGCCCTGATGACTCCCATGCCCACCGCCTGGTGCTACGGAGGGGCACGCTGACCAGGGGCTC
AGTGCGGTGGGGCACTCTGAGTGTACTGGAGACTGCAGTACTGGAGGAGCACAGGTCTATGA
ACCCTTGCCCGGTGCTGGATGAGCACTCTGGTACCATCTTCCTCTTCTTCATTGCCGTGCTG
GGCCACACACCGGAGGCCGTGCAAATCGCCACTGGCAAGAACGCTGCTCGCCTCTGCTGTGT
GACCAGCTGTGACGCTGGCCTCACCTGGGGCAGTGTTCGAGATCTCACTGAGGAAGCCATTG
GTGCTGCATTGCAGGACTGGGCCACCTTTGCTGTGGGTCCGGGCCATGGAGTTCAGCTGCGC
TCGGGTCGCCTGCTTGTTCCTGCTTACACCTATCATGTGGACCGACGGGAATGTTTTGGCAA
GATCTGCTGGACCAGTCCCCACTCCTTGGCATTCTACAGTGATGATCATGGGATCTCCTGGC
ATTGTGGAGGCCTTGTGCCCAACCTACGCTCTGGAGAGTGCCAACTGGCTGCGGTAGATGGA
GACTTTCTCTACTGTAATGCTCGAAGCCCTCTGGGTAACCGTGTGCAGGCACTGAGTGCTGA
TGAAGGCACGTCCTTCCTACCAGGGGAGCTGGTGCCTACATTGGCAGAGACGGCTCGTGGTT
GCCAGGGTAGCATTGTGGGCTTCCTAGCTCCACCCTCAATCGAGCCTCAGGATGACCGGTGG
ACAGGGAGTCCTAGGAACACCCCACATTCCCCATGCTTCAATCTCAGAGTACAGGAGTCTTC
GGGGGAAGGTGCCAGAGGTCTTCTTGAACGTTGGATGCCCAGGTTGCCTCTCTGCTACCCAC
AGTCCCGGAGCCCAGAGAATCATGGCCTAGAGCCTGGGTCAGATGGAGATAAGACATCCTGG
ACTCCGGAATGTCCTATGTCCTCTGATTCCATGCTTCAGAGCCCCACATGGCTACTATATTC
CCACCCAGCAGGGCGTAGAGCTCGGCTCCACATGGGAATCTACCTGAGCCGATCCCCCTTGG
ATCCCCACAGCTGGACAGAGCCCTGGGTGATCTATGAGGGCCCCAGTGGCTACTCTGACCTT
GCCTTTCTTGGGCCTATGCCTGGGGCATCCCTGGTTTTTGCCTGTCTGTTTGAGAGCGGGAC
CAGGACTTCCTATGAAGACATTTCTTTTTGCTTGTTCTCACTGGCGGATGTCCTGGAGAATG
TGCCCACTGGCTTAGAGATGCTAAGTCTCAGGGATAAGGCTCAGGGGCATTGCTGGCCCTCT
TGATGGCCTCACCCTCTCGTAGCCGCCTGGAGAGGAAGGGTAGACTATATAGAGGAGGTTAG
GGGTAGGTCAGCATGATGCTAGGATGGAGAGAGCTCTGTCCCCTCGTGGATGGTGGTGGTGA
CTCACCCGGGGGGCCAGCTGCTTTCTGAGTGCAAATGAGAAAAATAAAGAGCTGCGCTGTGA
CTTTTCTTTCCACATCAAAGCTTGGGTGTCAGTGCTTTAGCTTGATGCTCTGATCACCATGC
AAATCTTCCACCGGCGCCTTGCTCAGCTTTCATATCCCAAGGGTGCCTGGGAGGAAGGCAAC
AGGGACAGTGGACATCACTGCACCACTTTCCACGACCCTGTGTGCCAACCTCAGCCACTTTG
AAACATGCTGATGACTGAGGTCTGTTCACTTTCTTAATTTCAAGCAGGAGAAGCAGGTTGGG
GAGCCAGCCTCCCCAGCTAGAGGGGACAGAACTTGACTTGAGCAGGGGGGTACCTCCTAGGA
CCTGCTCCATGTGCCTACTTCTTTACCCTTCTCTAGAGAGGGCTCTTGTCCTGTCAGAGCTG
TTTTCTCCCTTCTCTTGTTTTTTCTTTTTCAAGACTGTTTCTCTGTGTTAGCCCTGGCTGTC
CTGGATCTCACTCTGTAGATCAGGCTGACCTTGAGTTCAAAGCTCCATCTGCCTCTACTTCT
CACATTACTGTGATTAAAGGCATATACTACCACTGCCTGGTGCCCTTTTGTATTTCTTATTA
AAGTCCTAATGTCTGATTATAAAAACAGTCTGTGTGGGCTGGAGTGATGGCTTACTCAGTAA
AGCACTTGCCATGGAATCTGGGCAATCTGAGTTTCATTTTTAGCATCCTGTAAAAATCCCAA
TTTGATGGTGTACTTGTAATGTCAGCATGGAGAGGCAGAGATAGGTAAGTTCCCCAAGACTC
TTTGAACCGACAGCTTGGCCTCACTGGCACATTCCAGGTCTCAGTGAGAGACCCTGCCTCAA
AATACAAAGAAAGAGCTGCTGAAGAGTGGGTCAGAGTTGACCTCTGATCTCCGGAAGTATAT
GATACACACCCGTGCATGCACTCTTCCTTACAAAATAAAAAGCAAAACAAAACCCCAACAGG
TATATGGCCATTTTAGAAAAATTAGAAGATTTAGAAAGCTATACATAAAAAAAAATGACCTA
AAGAAAAATCTTTACTGTTCTGGGCACTATCCCTATCAAACCACTGTGTTCTTTGGCCAAGC
CTTGGGGTGGACACTGTTTTGAGGTGGGTCCTGTTATCTCCACTAGGTAGTGGAGTTTTGTG
TCAGACTAACTGGGTCTTAAAGCTGTCTTTAAGGCCATCAGGAGCTACTGACTTGCCTGCCT
CAGCAGAGCATATCCTGAAGGTCGGGGTTAAGTCTCCTTCCCGAGCGAGTTGCCTTCCAGTG
GGCCCCTGGACTCCTAGGTCCTCAGCGCTCATCAGCTGCCAAGGACTCTGAGGGAATGTCCT
CTGACTGTGGCCCCGAAAGGTAGGGGAGGGGGATGTGCTTAGGCTTAGGACAGGGTCCTGTT
TCAGTCTGCCTTCACTGTTAGTAGCACTGTGCCACATGGCACAGACTGGGCGAGCTTTAAAG
GAAGGAGGTTGATATTGGTTCCCACTTCTGGGGATCATGGTTGAGCAGCCTTGTCTGATGAT
GGTTGTCTTGATGGTAGATCGTGAGGTAGTTGATGAAGGTATGACATGGTGAGAAACTCTGT
GTGTGTGTGTTATTTTCTCTGTGTTCTACCTATACATCTATCTATGTATATATGTATCTATC
TATCTACCTGGAGGCTGGAGAGATAGCTTAGTGGTTAAGAACATTTGTTGTTCTTGCATAGT
CCTGGATTTAAATTTTCAGCACCCACATGGCAGCTCACAACAACCCATAAATCCAGTTTCAG
AGGATCCAACCTCTGATATACCATGTCAGCCAGAGCAGACACGGCTGAAGGTGGTTTGATCC
CCGTATGGAGAGGTGACAATTGGGAAGAGAGAAAGATCAACTTAACCATGCAAGGAACAGGA
AGTTAAATACTGAACAGGGAAGGTAAAGGCAGGAAGTAGATGTAGAGGGCAAATCAATGAAA
CCCAAACATACCCAAATTACGCTAAACACACACTGACATGCCAATTAAAAGGACAAATTGGC
TCCACTGGCAAAACCAAAACAGACACTGAAGATCCAAACAGTCACATGCCAACTACCGCGGA
GGGAGACAGACACAGAGAAGACCGTGACAGACACTTGGACACTCTTGAGAGTGGATGTGCAG
GAAGAGAGCTCTGCCAGTGGAGAAGAAAGCACTCAGAAGAAAGTGACAGCAGCTGTAAATTT
GTATTCTGCTAATGTTATGTTCCAAAGTTGAAAGCAAAATTGTACCAATTCATAAGAACAAA
CAGGCTGACTCTCAGTTGTGACTGAACGTCTCTCAGTAACTGACGGGGCGAGCAGGCCAAAG
GAGAGTCGGCTCAGAAGGGTGCATAGCCACGCCAAATCAAATAAGCAAGTACAACCGGCAGG
CTCTATTTCTAGCACAAAGGGGTCTGTGCCTCATTCTGTGCTTGGGTCAGAGCTTGGGTCTC
TCATTTGGATGTAAGTGGTGTAGTGGAGAAGCAGGAAATAATCCGGAGCGCATATTTTGATT
TTAACATAAGTGCTGATTTGGGAGGGAGTTTTGTCAAATTGTGTTTTTACAATGTTTTTTTT
TTTTTAAATGATGCTTTTTTGTAAAGTGTACAAATGTGATATAAGATTGGTTCTGCTACATT
CAGTTTCTATAAAAGTGGTTCTAAAATATTGTACTGTCAATCATCTCATGATTATTCTACTG
TAGACATTACTGACTTTGTATGTAATAATTAATATTAGAAGAAAATATAATTTATTTGAATA
TAAAAAAAAAAAAAAAAAAA
SEQ ID NO: 46:
X₁ASLPX₂LQX₃ESVFQSGAHAYRIPALLYLPGQQSLLAFAEQRASKKDEHAELIVLRRGDYD
AX₄THQVQWQAQEVVAQARLDGHRSMNPCPLYDX₅QTGTLFLFFIAIPGQVTEQQQLQTRANV
TRLCQVTSTDHGRTWSSPRDLTDAAIGPAYREWSTFAVGPGHCLQLHDRARSLVVPAYAYRK
LHPX₆QRPIPSAFCFLSHDHGRTWARGHFVAQDTLECQVAEVETGEQRVVTLNARSHLRARV
QAQSTNDGLDFQESQLVKKLVEPPPX₇GCQGSVISFPSPRSGPGSPAQWLLYTHPTHX₈X₉QR
ADLGAYLNPRPPAPEAWSEPVLLAKGSX₁₀AYSDLQSMGTGPDGSPLFGCLYEANDYEEIX₁₁
FX₁₂MFTLKQAFPAEYLPQ
SEQ ID NO: 47:
X₁X₂SX₃X₄X₅LQX₆ESVFQSGAHAYRIPALLYLPGQQSLLAFAEQRASX₇X₈DEHAELIVX₉RR
GDYDAX₁₀THQVQWX₁₁AQEVVAQAX₁₂LDGHRSMNPCPLYDX₁₃QTGTLFLFFIAIPX₁₄X₁₅VT
EX₁₆QQLQTRANVTRLX₁₇X₁₈VTSTDHGRTWSSPRDLTDAAIGPX₁₉YREWSTFAVGPGHX₂₀L
QLHDRX₂₁RSLVVPAYAYRKLHPX₂₂QRPIPSAFX₂₃FLSHDHGRTWARGHFVAQDTX₂₄ECQVA
EVETGEQRVVTLNARSHLRARVQAQSX₂₅NX₂₆GLDFQX₂₇SQLVKKLVEPPPX₂₈GX₂₉QGSVI
SFPSPRSGPGSPAQX₃₀LLYTHPTHX₃₁X₃₂QRADLGAYLNPRPPAPEAWSEPX₃₃LLAKGSX₃₄
AYSDLQSMGTGPDGSPLFGX₃₅LYEANDYEEIX₃₆FX₃₇MFTLKQAFPAEYLPQ
SEQ ID NO: 48:
DASLPYLQKESVFQSGAHAYRIPALLYLPGQQSLLAFAEQRASKKDEHAELIVLRRGDYDAG
THQVQWQAQEVVAQARLDGHRSMNPCPLYDEQTGTLFLFFIAIPGQVTEQQQLQTRANVTRL
CQVTSTDHGRTWSSPRDLTDAAIGPAYREWSTFAVGPGHCLQLHDRARSLVVPAYAYRKLHP
KQRPIPSAFCFLSHDHGRTWARGHFVAQDTLECQVAEVETGEQRVVTLNARSHLRARVQAQS
TNDGLDFQESQLVKKLVEPPPQGCQGSVISFPSPRSGPGSPAQWLLYTHPTHSWQRADLGAY
LNPRPPAPEAWSEPVLLAKGSAAYSDLQSMGTGPDGSPLFGCLYEANDYEEIVFLMFTLKQA
FPAEYLPQ
SEQ ID NO: 49:
DASLPYLQDESVFQSGAHAYRIPALLYLPGQQSLLAFAEQRASKKDEHAELIVLRRGDYDAP
THQVQWQAQEVVAQARLDGHRSMNPCPLYDEQTGTLFLFFIAIPGQVTEQQQLQTRANVTRL
CQVTSTDHGRTWSSPRDLTDAAIGPAYREWSTFAVGPGHCLQLHDRARSLVVPAYAYRKLHP
KQRPIPSAFCFLSHDHGRTWARGHFVAQDTLECQVAEVETGEQRVVTLNARSHLRARVQAQS
TNDGLDFQESQLVKKLVEPPPQGCQGSVISFPSPRSGPGSPAQWLLYTHPTHSWQRADLGAY
LNPRPPAPEAWSEPVLLAKGSAAYSDLQSMGTGPDGSPLFGCLYEANDYEEIRFIMFTLKQA
FPAEYLPQ
SEQ ID NO: 50:
DASLPYLQKESVFQSGAHAYRIPALLYLPGQQSLLAFAEQRASKKDEHAELIVLRRGDYDAN
THQVQWQAQEVVAQARLDGHRSMNPCPLYDAQTGTLFLFFIAIPGQVTEQQQLQTRANVTRL
CQVTSTDHGRTWSSPRDLTDAAIGPAYREWSTFAVGPGHCLQLHDRARSLVVPAYAYRKLHP
KQRPIPSAFCFLSHDHGRTWARGHFVAQDTLECQVAEVETGEQRVVTLNARSHLRARVQAQS
TNDGLDFQESQLVKKLVEPPPQGCQGSVISFPSPRSGPGSPAQWLLYTHPTHSWQRADLGAY
LNPRPPAPEAWSEPVLLAKGSAAYSDLQSMGTGPDGSPLFGCLYEANDYEEIVFLMFTLKQA
FPAEYLPQ
SEQ ID NO: 51:
DASLPYLQKESVFQSGAHAYRIPALLYLPGQQSLLAFAEQRASKKDEHAELIVLRRGDYDAP
THQVQWQAQEVVAQARLDGHRSMNPCPLYDAQTGTLFLFFIAIPGQVTEQQQLQTRANVTRL
CQVTSTDHGRTWSSPRDLTDAAIGPAYREWSTFAVGPGHCLQLHDRARSLVVPAYAYRKLHP
KQRPIPSAFCFLSHDHGRTWARGHFVAQDTLECQVAEVETGEQRVVTLNARSHLRARVQAQS
TNDGLDFQESQLVKKLVEPPPAGCQGSVISFPSPRSGPGSPAQWLLYTHPTHRKQRADLGAY
LNPRPPAPEAWSEPVLLAKGSAAYSDLQSMGTGPDGSPLFGCLYEANDYEEIVFLMFTLKQA
FPAEYLPQ
SEQ ID NO: 52:
DASLPYLQKESVFQSGAHAYRIPALLYLPGQQSLLAFAEQRASKKDEHAELIVLRRGDYDAS
THQVQWQAQEVVAQARLDGHRSMNPCPLYDAQTGTLFLFFIAIPGQVTEQQQLQTRANVTRL
CQVTSTDHGRTWSSPRDLTDAAIGPAYREWSTFAVGPGHCLQLHDRARSLVVPAYAYRKLHP
KQRPIPSAFCFLSHDHGRTWARGHFVAQDTLECQVAEVETGEQRVVTLNARSHLRARVQAQS
TNDGLDFQESQLVKKLVEPPPAGCQGSVISFPSPRSGPGSPAQWLLYTHPTHRKQRADLGAY
LNPRPPAPEAWSEPVLLAKGSAAYSDLQSMGTGPDGSPLFGCLYEANDYEEIVFLMFTLKQA
FPAEYLPQ
SEQ ID NO: 53:
DASLPYLQKESVFQSGAHAYRIPALLYLPGQQSLLAFAEQRASKKDEHAELIVLRRGDYDAT
THQVQWQAQEVVAQARLDGHRSMNPCPLYDAQTGTLFLFFIAIPGQVTEQQQLQTRANVTRL
CQVTSTDHGRTWSSPRDLTDAAIGPAYREWSTFAVGPGHCLQLHDRARSLVVPAYAYRKLHP
KQRPIPSAFCFLSHDHGRTWARGHFVAQDTLECQVAEVETGEQRVVTLNARSHLRARVQAQS
TNDGLDFQESQLVKKLVEPPPAGCQGSVISFPSPRSGPGSPAQWLLYTHPTHRKQRADLGAY
LNPRPPAPEAWSEPVLLAKGSAAYSDLQSMGTGPDGSPLFGCLYEANDYEEIVFLMFTLKQA
FPAEYLPQ
SEQ ID NO: 54:
DASLPYLQKESVFQSGAHAYRIPALLYLPGQQSLLAFAEQRASKKDEHAELIVLRRGDYDAN
THQVQWQAQEVVAQARLDGHRSMNPCPLYDAQTGTLFLFFIAIPGQVTEQQQLQTRANVTRL
CQVTSTDHGRTWSSPRDLTDAAIGPAYREWSTFAVGPGHCLQLHDRARSLVVPAYAYRKLHP
KQRPIPSAFCFLSHDHGRTWARGHFVAQDTLECQVAEVETGEQRVVTLNARSHLRARVQAQS
TNDGLDFQESQLVKKLVEPPPAGCQGSVISFPSPRSGPGSPAQWLLYTHPTHRKQRADLGAY
LNPRPPAPEAWSEPVLLAKGSAAYSDLQSMGTGPDGSPLFGCLYEANDYEEIVFLMFTLKQA
FPAEYLPQ
SEQ ID NO: 55:
ASLPYLQKESVFQSGAHAYRIPALLYLPGQQSLLAFAEQRASKKDEHAELIVLRRGDYDAPT
HQVQWQAQEVVAQARLDGHRSMNPCPLYDAQTGTLFLFFIAIPGQVTEQQQLQTRANVTRLC
QVTSTDHGRTWSSPRDLTDAAIGPAYREWSTFAVGPGHCLQLHDRARSLVVPAYAYRKLHPK
QRPIPSAFCFLSHDHGRTWARGHFVAQDTLECQVAEVETGEQRVVTLNARSHLRARVQAQST
NDGLDFQESQLVKKLVEPPPQGCQGSVISFPSPRSGPGSPAQWLLYTHPTHSWQRADLGAYL
NPRPPAPEAWSEPVLLAKGSCAYSDLQSMGTGPDGSPLFGCLYEANDYEEIVFLMFTLKQAF
PAEYLPQ
SEQ ID NO: 56:
MASLPYLQKESVFQSGAHAYRIPALLYLPGQQSLLAFAEQRASKKDEHAELIVLRRGDYDAP
THQVQWQAQEVVAQARLDGHRSMNPCPLYDAQTGTLFLFFIAIPGQVTEQQQLQTRANVTRL
CQVTSTDHGRTWSSPRDLTDAAIGPAYREWSTFAVGPGHCLQLHDRARSLVVPAYAYRKLHP
KQRPIPSAFCFLSHDHGRTWARGHFVAQDTLECQVAEVETGEQRVVTLNARSHLRARVQAQS
TNDGLDFQESQLVKKLVEPPPQGCQGSVISFPSPRSGPGSPAQWLLYTHPTHSWQRADLGAY
LNPRPPAPEAWSEPVLLAKGSCAYSDLQSMGTGPDGSPLFGCLYEANDYEEIVFLMFTLKQA
FPAEYLPQ
SEQ ID NO: 57:
ASLPYLQKESVFQSGAHAYRIPALLYLPGQQSLLAFAEQRASKKDEHAELIVLRRGDYDAPT
HQVQWQAQEVVAQARLDGHRSMNPCPLYDAQTGTLFLFFIAIPGQVTEQQQLQTRANVTRLC
QVTSTDHGRTWSSPRDLTDAAIGPAYREWSTFAVGPGHCLQLHDRARSLVVPAYAYRKLHPK
QRPIPSAFCFLSHDHGRTWARGHFVAQDTLECQVAEVETGEQRVVTLNARSHLRARVQAQST
NDGLDFQESQLVKKLVEPPPQGCQGSVISFPSPRSGPGSPAQWLLYTHPTHSWQRADLGAYL
NPRPPAPEAWSEPVLLAKGSAAYSDLQSMGTGPDGSPLFGCLYEANDYEEIVFLMFTLKQAF
PAEYLPQ
SEQ ID NO: 58:
DASLPYLQKESVFQSGAHAYRIPALLYLPGQQSLLAFAEQRASKKDEHAELIVLRRGDYDAP
THQVQWQAQEVVAQARLDGHRSMNPCPLYDAQTGTLFLFFIAIPGQVTEQQQLQTRANVTRL
CQVTSTDHGRTWSSPRDLTDAAIGPAYREWSTFAVGPGHCLQLHDRARSLVVPAYAYRKLHP
KQRPIPSAFCFLSHDHGRTWARGHFVAQDTLECQVAEVETGEQRVVTLNARSHLRARVQAQS
TNDGLDFQESQLVKKLVEPPPQGCQGSVISFPSPRSGPGSPAQWLLYTHPTHSWQRADLGAY
LNPRPPAPEAWSEPVLLAKGSAAYSDLQSMGTGPDGSPLFGCLYEANDYEEIVFLMFTLKQA
FPAEYLPQ
SEQ ID NO: 59:
DASLPYLQKESVFQSGAHAYRIPALLYLPGQQSLLAFAEQRASKKDEHAELIVLRRGDYDAP
THQVQWQAQEVVAQARLDGHRSMNPCPLYDAQTGTLFLFFIAIPGQVTEQQQLQTRANVTRL
CQVTSTDHGRTWSSPRDLTDAAIGPAYREWSTFAVGPGHCLQLHDRARSLVVPAYAYRKLHP
KQRPIPSAFCFLSHDHGRTWARGHFVAQDTLECQVAEVETGEQRVVTLNARSHLRARVQAQS
TNDGLDFQESQLVKKLVEPPPQGCQGSVISFPSPRSGPGSPAQWLLYTHPTHSWQRADLGAY
LNPRPPAPEAWSEPVLLAKGSCAYSDLQSMGTGPDGSPLFGCLYEANDYEEIVFLMFTLKQA
FPAEYLPQ
SEQ ID NO: 60:
AASLPYLQKESVFQSGAHAYRIPALLYLPGQQSLLAFAEQRASKKDEHAELIVLRRGDYDAP
THQVQWQAQEVVAQARLDGHRSMNPCPLYDAQTGTLFLFFIAIPGQVTEQQQLQTRANVTRL
CQVTSTDHGRTWSSPRDLTDAAIGPAYREWSTFAVGPGHCLQLHDRARSLVVPAYAYRKLHP
KQRPIPSAFCFLSHDHGRTWARGHFVAQDTLECQVAEVETGEQRVVTLNARSHLRARVQAQS
TNDGLDFQESQLVKKLVEPPPQGCQGSVISFPSPRSGPGSPAQWLLYTHPTHSWQRADLGAY
LNPRPPAPEAWSEPVLLAKGSAAYSDLQSMGTGPDGSPLFGCLYEANDYEEIVFLMFTLKQA
FPAEYLPQ
SEQ ID NO: 61:
MASLPYLQKESVFQSGAHAYRIPALLYLPGQQSLLAFAEQRASKKDEHAELIVLRRGDYDAP
THQVQWQAQEVVAQARLDGHRSMNPCPLYDAQTGTLFLFFIAIPGQVTEQQQLQTRANVTRL
CQVTSTDHGRTWSSPRDLTDAAIGPAYREWSTFAVGPGHCLQLHDRARSLVVPAYAYRKLHP
KQRPIPSAFCFLSHDHGRTWARGHFVAQDTLECQVAEVETGEQRVVTLNARSHLRARVQAQS
TNDGLDFQESQLVKKLVEPPPQGCQGSVISFPSPRSGPGSPAQWLLYTHPTHSWQRADLGAY
LNPRPPAPEAWSEPVLLAKGSAAYSDLQSMGTGPDGSPLFGCLYEANDYEEIVFLMFTLKQA
FPAEYLPQ
SEQ ID NO: 62:
AASLPYLQKESVFQSGAHAYRIPALLYLPGQQSLLAFAEQRASKKDEHAELIVLRRGDYDAP
THQVQWQAQEVVAQARLDGHRSMNPCPLYDAQTGTLFLFFIAIPGQVTEQQQLQTRANVTRL
CQVTSTDHGRTWSSPRDLTDAAIGPAYREWSTFAVGPGHCLQLHDRARSLVVPAYAYRKLHP
KQRPIPSAFCFLSHDHGRTWARGHFVAQDTLECQVAEVETGEQRVVTLNARSHLRARVQAQS
TNDGLDFQESQLVKKLVEPPPQGCQGSVISFPSPRSGPGSPAQWLLYTHPTHSWQRADLGAY
LNPRPPAPEAWSEPVLLAKGSCAYSDLQSMGTGPDGSPLFGCLYEANDYEEIVFLMFTLKQA
FPAEYLPQ
SEQ ID NO: 63:
EVQLVESGGGLVQPGGSLRLSCAASGFNIKDTYIHWVRQAPGKGLEWVARIYPTNGYTRYAD
SVKGRFTISADTSKNTAYLQMNSLRAEDTAVYYCSRWGGDGFYAMDYWGQGTLVTVSSASTK
GPSVFPLAPSSKSTSGGTAALGCLVKDYFPEPVTVSWNSGALTSGVHTFPAVLQSSGLYSLS
SVVTVPSSSLGTQTYICNVNHKPSNTKVDKKVEPKSCDKTHTCPPCPAPELLGGPSVFLFPP
KPKDTLMISRTPEVTCVVVDVSHEDPEVKFNWYVDGVEVHNAKTKPREEQYNSTYRVVSVLT
VLHQDWLNGKEYKCKVSNKALPAPIEKTISKAKGQPREPQVYTLPPSREEMTKNQVSLYCLV
KGFYPSDIAVEWESNGQPENNYKTTPPVLDSDGSFFLYSKLTVDKSRWQQGNVFSCSVMHEA
LHNHYTQKSLSLSPGK
SEQ ID NO: 64:
DIQMTQSPSSLSASVGDRVTITCRASQDVNTAVAWYQQKPGKAPKLLIYSASFLYSGVPSRF
SGSRSGTDFTLTISSLQPEDFATYYCQQHYTTPPTFGQGTKVEIKRTVAAPSVFIFPPSDEQ
LKSGTASVVCLLNNFYPREAKVQWKVDNALQSGNSQESVTEQDSKDSTYSLSSTLTLSKADY
EKHKVYACEVTHQGLSSPVTKSFNRGEC
SEQ ID NO: 65:
EVQLVESGGGLVQPGGSLRLSCAASGFNIKDTYIHWVRQAPGKGLEWVARIYPTNGYTRYAD
SVKGRFTISADTSKNTAYLQMNSLRAEDTAVYYCSRWGGDGFYAMDYWGQGTLVTVSSGGGG
SGGGGSGGGGSDIQMTQSPSSLSASVGDRVTITCRASQDVNTAVAWYQQKPGKAPKLLIYSA
SFLYSGVPSRFSGSRSGTDFTLTISSLQPEDFATYYCQQHYTTPPTFGQGTKVEIK
SEQ ID NO: 66:
DIQMTQSPSSLSASVGDRVTITCRASQDVNTAVAWYQQKPGKAPKLLIYSASFLYSGVPSRF
SGSRSGTDFTLTISSLQPEDFATYYCQQHYTTPPTFGQGTKVEIKRTVAAPSVFIFPPSDEQ
LKSGTASVVCLLNNFYPREAKVQWKVDNALQSGNSQESVTEQDSKDSTYSLSSTLTLSKADY
EKHKVYACEVTHQGLSSPVTKSFNRGEC
SEQ ID NO: 67:
EVQLVESGGGLVQPGGSLRLSCAASGFNIKDTYIHWVRQAPGKGLEWVARIYPTNGYTRYAD
SVKGRFTISADTSKNTAYLQMNSLRAEDTAVYYCSRWGGDGFYAMDYWGQGTLVTVSSASTK
GPSVFPLAPSSKSTSGGTAALGCLVKDYFPEPVTVSWNSGALTSGVHTFPAVLQSSGLYSLS
SVVTVPSSSLGTQTYICNVNHKPSNTKVDKKVEPKSCDKTHTCPPCPAPELLGGPSVFLFPP
KPKDTLMISRTPEVTCVVVDVSHEDPEVKFNWYVDGVEVHNAKTKPREEQYNSTYRVVSVLT
VLHQDWLNGKEYKCKVSNKALPAPIEKTISKAKGQPREPQVYTLPPSREEMTKNQVSLYCLV
KGFYPSDIAVEWESNGQPENNYKTTPPVLDSDGSFFLYSKLTVDKSRWQQGNVFSCSVMHEA
LHNHYTQKSLSLSPGK
SEQ ID NO: 68:
DASLPYLQKESVFQSGAHAYRIPALLYLPGQQSLLAFAEQRASKKDEHAELIVLRRGDYDAG
THQVQWQAQEVVAQARLDGHRSMNPCPLYDEQTGTLFLFFIAIPGQVTEQQQLQTRANVTRL
CQVTSTDHGRTWSSPRDLTDAAIGPAYREWSTFAVGPGHCLQLHDRARSLVVPAYAYRKLHP
KQRPIPSAFCFLSHDHGRTWARGHFVAQDTLECQVAEVETGEQRVVTLNARSHLRARVQAQS
TNDGLDFQESQLVKKLVEPPPQGCQGSVISFPSPRSGPGSPAQWLLYTHPTHSWQRADLGAY
LNPRPPAPEAWSEPVLLAKGSAAYSDLQSMGTGPDGSPLFGCLYEANDYEEIVFLMFTLKQA
FPAEYLPQGGGGSGGGGSDKTHTCPPCPAPELLGGPSVFLFPPKPKDTLMISRTPEVTCVVV
DVSHEDPEVKFNWYVDGVEVHNAKTKPREEQYNSTYRVVSVLTVLHQDWLNGKEYKCKVSNK
ALPAPIEKTISKAKGQPREPQVYTLPPSREEMTKNQVSLTCLVKGFYPSDIAVEWESNGQPE
NNYKTTPPVLDSDGSFFLTSKLTVDKSRWQQGNVFSCSVMHEALHNHYTQKSLSLSPGK
SEQ ID NO: 69:
DASLPYLQDESVFQSGAHAYRIPALLYLPGQQSLLAFAEQRASKKDEHAELIVLRRGDYDAP
THQVQWQAQEVVAQARLDGHRSMNPCPLYDEQTGTLFLFFIAIPGQVTEQQQLQTRANVTRL
CQVTSTDHGRTWSSPRDLTDAAIGPAYREWSTFAVGPGHCLQLHDRARSLVVPAYAYRKLHP
KQRPIPSAFCFLSHDHGRTWARGHFVAQDTLECQVAEVETGEQRVVTLNARSHLRARVQAQS
TNDGLDFQESQLVKKLVEPPPQGCQGSVISFPSPRSGPGSPAQWLLYTHPTHSWQRADLGAY
LNPRPPAPEAWSEPVLLAKGSAAYSDLQSMGTGPDGSPLFGCLYEANDYEEIRFIMFTLKQA
FPAEYLPQGGGGSGGGGSDKTHTCPPCPAPELLGGPSVFLFPPKPKDTLMISRTPEVTCVVV
DVSHEDPEVKFNWYVDGVEVHNAKTKPREEQYNSTYRVVSVLTVLHQDWLNGKEYKCKVSNK
ALPAPIEKTISKAKGQPREPQVYTLPPSREEMTKNQVSLTCLVKGFYPSDIAVEWESNGQPE
NNYKTTPPVLDSDGSFFLTSKLTVDKSRWQQGNVFSCSVMHEALHNHYTQKSLSLSPGK
SEQ ID NO: 70:
DASLPYLQKESVFQSGAHAYRIPALLYLPGQQSLLAFAEQRASKKDEHAELIVLRRGDYDAN
THQVQWQAQEVVAQARLDGHRSMNPCPLYDAQTGTLFLFFIAIPGQVTEQQQLQTRANVTRL
CQVTSTDHGRTWSSPRDLTDAAIGPAYREWSTFAVGPGHCLQLHDRARSLVVPAYAYRKLHP
KQRPIPSAFCFLSHDHGRTWARGHFVAQDTLECQVAEVETGEQRVVTLNARSHLRARVQAQS
TNDGLDFQESQLVKKLVEPPPQGCQGSVISFPSPRSGPGSPAQWLLYTHPTHSWQRADLGAY
LNPRPPAPEAWSEPVLLAKGSAAYSDLQSMGTGPDGSPLFGCLYEANDYEEIVFLMFTLKQA
FPAEYLPQGGGGSGGGGSDKTHTCPPCPAPELLGGPSVFLFPPKPKDTLMISRTPEVTCVVV
DVSHEDPEVKFNWYVDGVEVHNAKTKPREEQYNSTYRVVSVLTVLHQDWLNGKEYKCKVSNK
ALPAPIEKTISKAKGQPREPQVYTLPPSREEMTKNQVSLTCLVKGFYPSDIAVEWESNGQPE
NNYKTTPPVLDSDGSFFLTSKLTVDKSRWQQGNVFSCSVMHEALHNHYTQKSLSLSPGK
SEQ ID NO: 71:
DASLPYLQKESVFQSGAHAYRIPALLYLPGQQSLLAFAEQRASKKDEHAELIVLRRGDYDAP
THQVQWQAQEVVAQARLDGHRSMNPCPLYDAQTGTLFLFFIAIPGQVTEQQQLQTRANVTRL
CQVTSTDHGRTWSSPRDLTDAAIGPAYREWSTFAVGPGHCLQLHDRARSLVVPAYAYRKLHP
KQRPIPSAFCFLSHDHGRTWARGHFVAQDTLECQVAEVETGEQRVVTLNARSHLRARVQAQS
TNDGLDFQESQLVKKLVEPPPAGCQGSVISFPSPRSGPGSPAQWLLYTHPTHRKQRADLGAY
LNPRPPAPEAWSEPVLLAKGSAAYSDLQSMGTGPDGSPLFGCLYEANDYEEIVFLMFTLKQA
FPAEYLPQGGGGSGGGGSDKTHTCPPCPAPELLGGPSVFLFPPKPKDTLMISRTPEVTCVVV
DVSHEDPEVKFNWYVDGVEVHNAKTKPREEQYNSTYRVVSVLTVLHQDWLNGKEYKCKVSNK
ALPAPIEKTISKAKGQPREPQVYTLPPSREEMTKNQVSLTCLVKGFYPSDIAVEWESNGQPE
NNYKTTPPVLDSDGSFFLTSKLTVDKSRWQQGNVFSCSVMHEALHNHYTQKSLSLSPGK
SEQ ID NO: 72:
DASLPYLQKESVFQSGAHAYRIPALLYLPGQQSLLAFAEQRASKKDEHAELIVLRRGDYDAS
THQVQWQAQEVVAQARLDGHRSMNPCPLYDAQTGTLFLFFIAIPGQVTEQQQLQTRANVTRL
CQVTSTDHGRTWSSPRDLTDAAIGPAYREWSTFAVGPGHCLQLHDRARSLVVPAYAYRKLHP
KQRPIPSAFCFLSHDHGRTWARGHFVAQDTLECQVAEVETGEQRVVTLNARSHLRARVQAQS
TNDGLDFQESQLVKKLVEPPPAGCQGSVISFPSPRSGPGSPAQWLLYTHPTHRKQRADLGAY
LNPRPPAPEAWSEPVLLAKGSAAYSDLQSMGTGPDGSPLFGCLYEANDYEEIVFLMFTLKQA
FPAEYLPQGGGGSGGGGSDKTHTCPPCPAPELLGGPSVFLFPPKPKDTLMISRTPEVTCVVV
DVSHEDPEVKFNWYVDGVEVHNAKTKPREEQYNSTYRVVSVLTVLHQDWLNGKEYKCKVSNK
ALPAPIEKTISKAKGQPREPQVYTLPPSREEMTKNQVSLTCLVKGFYPSDIAVEWESNGQPE
NNYKTTPPVLDSDGSFFLTSKLTVDKSRWQQGNVFSCSVMHEALHNHYTQKSLSLSPGK
SEQ ID NO: 73:
DASLPYLQKESVFQSGAHAYRIPALLYLPGQQSLLAFAEQRASKKDEHAELIVLRRGDYDAT
THQVQWQAQEVVAQARLDGHRSMNPCPLYDAQTGTLFLFFIAIPGQVTEQQQLQTRANVTRL
CQVTSTDHGRTWSSPRDLTDAAIGPAYREWSTFAVGPGHCLQLHDRARSLVVPAYAYRKLHP
KQRPIPSAFCFLSHDHGRTWARGHFVAQDTLECQVAEVETGEQRVVTLNARSHLRARVQAQS
TNDGLDFQESQLVKKLVEPPPAGCQGSVISFPSPRSGPGSPAQWLLYTHPTHRKQRADLGAY
LNPRPPAPEAWSEPVLLAKGSAAYSDLQSMGTGPDGSPLFGCLYEANDYEEIVFLMFTLKQA
FPAEYLPQGGGGSGGGGSDKTHTCPPCPAPELLGGPSVFLFPPKPKDTLMISRTPEVTCVVV
DVSHEDPEVKFNWYVDGVEVHNAKTKPREEQYNSTYRVVSVLTVLHQDWLNGKEYKCKVSNK
ALPAPIEKTISKAKGQPREPQVYTLPPSREEMTKNQVSLTCLVKGFYPSDIAVEWESNGQPE
NNYKTTPPVLDSDGSFFLTSKLTVDKSRWQQGNVFSCSVMHEALHNHYTQKSLSLSPGK
SEQ ID NO: 74:
DASLPYLQKESVFQSGAHAYRIPALLYLPGQQSLLAFAEQRASKKDEHAELIVLRRGDYDAN
THQVQWQAQEVVAQARLDGHRSMNPCPLYDAQTGTLFLFFIAIPGQVTEQQQLQTRANVTRL
CQVTSTDHGRTWSSPRDLTDAAIGPAYREWSTFAVGPGHCLQLHDRARSLVVPAYAYRKLHP
KQRPIPSAFCFLSHDHGRTWARGHFVAQDTLECQVAEVETGEQRVVTLNARSHLRARVQAQS
TNDGLDFQESQLVKKLVEPPPAGCQGSVISFPSPRSGPGSPAQWLLYTHPTHRKQRADLGAY
LNPRPPAPEAWSEPVLLAKGSAAYSDLQSMGTGPDGSPLFGCLYEANDYEEIVFLMFTLKQA
FPAEYLPQGGGGSGGGGSDKTHTCPPCPAPELLGGPSVFLFPPKPKDTLMISRTPEVTCVVV
DVSHEDPEVKFNWYVDGVEVHNAKTKPREEQYNSTYRVVSVLTVLHQDWLNGKEYKCKVSNK
ALPAPIEKTISKAKGQPREPQVYTLPPSREEMTKNQVSLTCLVKGFYPSDIAVEWESNGQPE
NNYKTTPPVLDSDGSFFLTSKLTVDKSRWQQGNVFSCSVMHEALHNHYTQKSLSLSPGK
SEQ ID NO: 75:
X₁ASLPX₂LQX₃ESVFQSGAHAYRIPALLYLPGQQSLLAFAEQRASKKDEHAELIVLRRGDYD
AX₄THQVQWQAQEVVAQARLDGHRSMNPCPLYDX₅QTGTLFLFFIAIPGQVTEQQQLQTRANV
TRLCQVTSTDHGRTWSSPRDLTDAAIGPAYREWSTFAVGPGHCLQLHDRARSLVVPAYAYRK
LHPX₆QRPIPSAFCFLSHDHGRTWARGHFVAQDTLECQVAEVETGEQRVVTLNARSHLRARV
QAQSTNDGLDFQESQLVKKLVEPPPX₇GCQGSVISFPSPRSGPGSPAQWLLYTHPTHX₈X₉QR
ADLGAYLNPRPPAPEAWSEPVLLAKGSX₁₀AYSDLQSMGTGPDGSPLFGCLYEANDYEEIX₁₁
FX₁₂MFTLKQAFPAEYLPQGGGGSGGGGSDKTHTCPPCPAPELLGGPSVFLFPPKPKDTLMIS
RTPEVTCVVVDVSHEDPEVKFNWYVDGVEVHNAKTKPREEQYNSTYRVVSVLTVLHQDWLNG
KEYKCKVSNKALPAPIEKTISKAKGQPREPQVYTLPPSREEMTKNQVSLTCLVKGFYPSDIA
VEWESNGQPENNYKTTPPVLDSDGSFFLTSKLTVDKSRWQQGNVFSCSVMHEALHNHYTQKS
LSLSPGK
SEQ ID NO: 76:
X₁X₂SX₃X₄X₅LQX₆ESVFQSGAHAYRIPALLYLPGQQSLLAFAEQRASX₇X₈DEHAELIVX₉RR
GDYDAX₁₀THQVQWX₁₁AQEVVAQAX₁₂LDGHRSMNPCPLYDX₁₃QTGTLFLFFIAIPX₁₄X₁₅VT
EX₁₆QQLQTRANVTRLX₁₇X₁₈VTSTDHGRTWSSPRDLTDAAIGPX₁₉YREWSTFAVGPGHX₂₀L
QLHDRX₂₁RSLVVPAYAYRKLHPX₂₂QRPIPSAFX₂₃FLSHDHGRTWARGHFVAQDTX₂₄ECQVA
EVETGEQRVVTLNARSHLRARVQAQSX₂₅NX₂₆GLDFQX₂₇SQLVKKLVEPPPX₂₈GX₂₉QGSVI
SFPSPRSGPGSPAQX₃₀LLYTHPTHX₃₁X₃₂QRADLGAYLNPRPPAPEAWSEPX₃₃LLAKGSX₃₄
AYSDLQSMGTGPDGSPLFGX₃₅LYEANDYEEIX₃₆FX₃₇MFTLKQAFPAEYLPQGGGGSGGGGS
DKTHTCPPCPAPELLGGPSVFLFPPKPKDTLMISRTPEVTCVVVDVSHEDPEVKFNWYVDGV
EVHNAKTKPREEQYNSTYRVVSVLTVLHQDWLNGKEYKCKVSNKALPAPIEKTISKAKGQPR
EPQVYTLPPSREEMTKNQVSLTCLVKGFYPSDIAVEWESNGQPENNYKTTPPVLDSDGSFFL
TSKLTVDKSRWQQGNVFSCSVMHEALHNHYTQKSLSLSPGK
SEQ ID NO: 77:
DASLPYLQKESVFQSGAHAYRIPALLYLPGQQSLLAFAEQRASKKDEHAELIVLRRGDYDAG
THQVQWQAQEVVAQARLDGHRSMNPCPLYDEQTGTLFLFFIAIPGQVTEQQQLQTRANVTRL
CQVTSTDHGRTWSSPRDLTDAAIGPAYREWSTFAVGPGHCLQLHDRARSLVVPAYAYRKLHP
KQRPIPSAFCFLSHDHGRTWARGHFVAQDTLECQVAEVETGEQRVVTLNARSHLRARVQAQS
TNDGLDFQESQLVKKLVEPPPQGCQGSVISFPSPRSGPGSPAQWLLYTHPTHSWQRADLGAY
LNPRPPAPEAWSEPVLLAKGSAAYSDLQSMGTGPDGSPLFGCLYEANDYEEIVFLMFTLKQA
FPAEYLPQGGGGSGGGGSDKTHTCPPCPAPELLGGPSVFLFPPKPKDTLMISRTPEVTCVVV
DVSHEDPEVKFNWYVDGVEVHNAKTKPREEQYNSTYRVVSVLTVLHQDWLNGKEYKCKVSNK
ALPAPIEKTISKAKGQPREPQVYTLPPSREEMTKNQVSLTCLVKGFYPSDIAVEWESNGQPE
NNYKTTPPVLDSDGSFFLYSKLTVDKSRWQQGNVFSCSVMHEALHNHYTQKSLSLSPGKGGG
GSGGGGSGGGGSEVQLVESGGGLVQPGGSLRLSCAASGFNIKDTYIHWVRQAPGKGLEWVAR
IYPTNGYTRYADSVKGRFTISADTSKNTAYLQMNSLRAEDTAVYYCSRWGGDGFYAMDYWGQ
GTLVTVSSGGGGSGGGGSGGGGSDIQMTQSPSSLSASVGDRVTITCRASQDVNTAVAWYQQK
PGKAPKLLIYSASFLYSGVPSRFSGSRSGTDFTLTISSLQPEDFATYYCQQHYTTPPTFGQG
TKVEIK
SEQ ID NO: 78:
DASLPYLQDESVFQSGAHAYRIPALLYLPGQQSLLAFAEQRASKKDEHAELIVLRRGDYDAP
THQVQWQAQEVVAQARLDGHRSMNPCPLYDEQTGTLFLFFIAIPGQVTEQQQLQTRANVTRL
CQVTSTDHGRTWSSPRDLTDAAIGPAYREWSTFAVGPGHCLQLHDRARSLVVPAYAYRKLHP
KQRPIPSAFCFLSHDHGRTWARGHFVAQDTLECQVAEVETGEQRVVTLNARSHLRARVQAQS
TNDGLDFQESQLVKKLVEPPPQGCQGSVISFPSPRSGPGSPAQWLLYTHPTHSWQRADLGAY
LNPRPPAPEAWSEPVLLAKGSAAYSDLQSMGTGPDGSPLFGCLYEANDYEEIRFIMFTLKQA
FPAEYLPQGGGGSGGGGSDKTHTCPPCPAPELLGGPSVFLFPPKPKDTLMISRTPEVTCVVV
DVSHEDPEVKFNWYVDGVEVHNAKTKPREEQYNSTYRVVSVLTVLHQDWLNGKEYKCKVSNK
ALPAPIEKTISKAKGQPREPQVYTLPPSREEMTKNQVSLTCLVKGFYPSDIAVEWESNGQPE
NNYKTTPPVLDSDGSFFLYSKLTVDKSRWQQGNVFSCSVMHEALHNHYTQKSLSLSPGKGGG
GSGGGGSGGGGSEVQLVESGGGLVQPGGSLRLSCAASGFNIKDTYIHWVRQAPGKGLEWVAR
IYPTNGYTRYADSVKGRFTISADTSKNTAYLQMNSLRAEDTAVYYCSRWGGDGFYAMDYWGQ
GTLVTVSSGGGGSGGGGSGGGGSDIQMTQSPSSLSASVGDRVTITCRASQDVNTAVAWYQQK
PGKAPKLLIYSASFLYSGVPSRFSGSRSGTDFTLTISSLQPEDFATYYCQQHYTTPPTFGQG
TKVEIK
SEQ ID NO: 79:
DASLPYLQKESVFQSGAHAYRIPALLYLPGQQSLLAFAEQRASKKDEHAELIVLRRGDYDAN
THQVQWQAQEVVAQARLDGHRSMNPCPLYDAQTGTLFLFFIAIPGQVTEQQQLQTRANVTRL
CQVTSTDHGRTWSSPRDLTDAAIGPAYREWSTFAVGPGHCLQLHDRARSLVVPAYAYRKLHP
KQRPIPSAFCFLSHDHGRTWARGHFVAQDTLECQVAEVETGEQRVVTLNARSHLRARVQAQS
TNDGLDFQESQLVKKLVEPPPQGCQGSVISFPSPRSGPGSPAQWLLYTHPTHSWQRADLGAY
LNPRPPAPEAWSEPVLLAKGSAAYSDLQSMGTGPDGSPLFGCLYEANDYEEIVFLMFTLKQA
FPAEYLPQGGGGSGGGGSDKTHTCPPCPAPELLGGPSVFLFPPKPKDTLMISRTPEVTCVVV
DVSHEDPEVKFNWYVDGVEVHNAKTKPREEQYNSTYRVVSVLTVLHQDWLNGKEYKCKVSNK
ALPAPIEKTISKAKGQPREPQVYTLPPSREEMTKNQVSLTCLVKGFYPSDIAVEWESNGQPE
NNYKTTPPVLDSDGSFFLYSKLTVDKSRWQQGNVFSCSVMHEALHNHYTQKSLSLSPGKGGG
GSGGGGSGGGGSEVQLVESGGGLVQPGGSLRLSCAASGFNIKDTYIHWVRQAPGKGLEWVAR
IYPTNGYTRYADSVKGRFTISADTSKNTAYLQMNSLRAEDTAVYYCSRWGGDGFYAMDYWGQ
GTLVTVSSGGGGSGGGGSGGGGSDIQMTQSPSSLSASVGDRVTITCRASQDVNTAVAWYQQK
PGKAPKLLIYSASFLYSGVPSRFSGSRSGTDFTLTISSLQPEDFATYYCQQHYTTPPTFGQG
TKVEIK
SEQ ID NO: 80:
DASLPYLQKESVFQSGAHAYRIPALLYLPGQQSLLAFAEQRASKKDEHAELIVLRRGDYDAP
THQVQWQAQEVVAQARLDGHRSMNPCPLYDAQTGTLFLFFIAIPGQVTEQQQLQTRANVTRL
CQVTSTDHGRTWSSPRDLTDAAIGPAYREWSTFAVGPGHCLQLHDRARSLVVPAYAYRKLHP
KQRPIPSAFCFLSHDHGRTWARGHFVAQDTLECQVAEVETGEQRVVTLNARSHLRARVQAQS
TNDGLDFQESQLVKKLVEPPPAGCQGSVISFPSPRSGPGSPAQWLLYTHPTHRKQRADLGAY
LNPRPPAPEAWSEPVLLAKGSAAYSDLQSMGTGPDGSPLFGCLYEANDYEEIVFLMFTLKQA
FPAEYLPQGGGGSGGGGSDKTHTCPPCPAPELLGGPSVFLFPPKPKDTLMISRTPEVTCVVV
DVSHEDPEVKFNWYVDGVEVHNAKTKPREEQYNSTYRVVSVLTVLHQDWLNGKEYKCKVSNK
ALPAPIEKTISKAKGQPREPQVYTLPPSREEMTKNQVSLTCLVKGFYPSDIAVEWESNGQPE
NNYKTTPPVLDSDGSFFLYSKLTVDKSRWQQGNVFSCSVMHEALHNHYTQKSLSLSPGKGGG
GSGGGGSGGGGSEVQLVESGGGLVQPGGSLRLSCAASGFNIKDTYIHWVRQAPGKGLEWVAR
IYPTNGYTRYADSVKGRETISADTSKNTAYLQMNSLRAEDTAVYYCSRWGGDGEYAMDYWGQ
GTLVTVSSGGGGSGGGGSGGGGSDIQMTQSPSSLSASVGDRVTITCRASQDVNTAVAWYQQK
PGKAPKLLIYSASFLYSGVPSRFSGSRSGTDFTLTISSLQPEDFATYYCQQHYTTPPTFGQG
TKVEIK
SEQ ID NO: 81:
DASLPYLQKESVFQSGAHAYRIPALLYLPGQQSLLAFAEQRASKKDEHAELIVLRRGDYDAS
THQVQWQAQEVVAQARLDGHRSMNPCPLYDAQTGTLFLFFIAIPGQVTEQQQLQTRANVTRL
CQVTSTDHGRTWSSPRDLTDAAIGPAYREWSTFAVGPGHCLQLHDRARSLVVPAYAYRKLHP
KQRPIPSAFCFLSHDHGRTWARGHFVAQDTLECQVAEVETGEQRVVTLNARSHLRARVQAQS
TNDGLDFQESQLVKKLVEPPPAGCQGSVISFPSPRSGPGSPAQWLLYTHPTHRKQRADLGAY
LNPRPPAPEAWSEPVLLAKGSAAYSDLQSMGTGPDGSPLFGCLYEANDYEEIVFLMFTLKQA
FPAEYLPQGGGGSGGGGSDKTHTCPPCPAPELLGGPSVFLFPPKPKDTLMISRTPEVTCVVV
DVSHEDPEVKFNWYVDGVEVHNAKTKPREEQYNSTYRVVSVLTVLHQDWLNGKEYKCKVSNK
ALPAPIEKTISKAKGQPREPQVYTLPPSREEMTKNQVSLTCLVKGFYPSDIAVEWESNGQPE
NNYKTTPPVLDSDGSFFLYSKLTVDKSRWQQGNVFSCSVMHEALHNHYTQKSLSLSPGKGGG
GSGGGGSGGGGSEVQLVESGGGLVQPGGSLRLSCAASGFNIKDTYIHWVRQAPGKGLEWVAR
IYPTNGYTRYADSVKGRFTISADTSKNTAYLQMNSLRAEDTAVYYCSRWGGDGFYAMDYWGQ
GTLVTVSSGGGGSGGGGSGGGGSDIQMTQSPSSLSASVGDRVTITCRASQDVNTAVAWYQQK
PGKAPKLLIYSASFLYSGVPSRFSGSRSGTDFTLTISSLQPEDFATYYCQQHYTTPPTFGQG
TKVEIK
SEQ ID NO: 82:
DASLPYLQKESVFQSGAHAYRIPALLYLPGQQSLLAFAEQRASKKDEHAELIVLRRGDYDAT
THQVQWQAQEVVAQARLDGHRSMNPCPLYDAQTGTLFLFFIAIPGQVTEQQQLQTRANVTRL
CQVTSTDHGRTWSSPRDLTDAAIGPAYREWSTFAVGPGHCLQLHDRARSLVVPAYAYRKLHP
KQRPIPSAFCFLSHDHGRTWARGHFVAQDTLECQVAEVETGEQRVVTLNARSHLRARVQAQS
TNDGLDFQESQLVKKLVEPPPAGCQGSVISFPSPRSGPGSPAQWLLYTHPTHRKQRADLGAY
LNPRPPAPEAWSEPVLLAKGSAAYSDLQSMGTGPDGSPLFGCLYEANDYEEIVFLMFTLKQA
FPAEYLPQGGGGSGGGGSDKTHTCPPCPAPELLGGPSVFLFPPKPKDTLMISRTPEVTCVVV
DVSHEDPEVKFNWYVDGVEVHNAKTKPREEQYNSTYRVVSVLTVLHQDWLNGKEYKCKVSNK
ALPAPIEKTISKAKGQPREPQVYTLPPSREEMTKNQVSLTCLVKGFYPSDIAVEWESNGQPE
NNYKTTPPVLDSDGSFFLYSKLTVDKSRWQQGNVFSCSVMHEALHNHYTQKSLSLSPGKGGG
GSGGGGSGGGGSEVQLVESGGGLVQPGGSLRLSCAASGFNIKDTYIHWVRQAPGKGLEWVAR
IYPTNGYTRYADSVKGRFTISADTSKNTAYLQMNSLRAEDTAVYYCSRWGGDGFYAMDYWGQ
GTLVTVSSGGGGSGGGGSGGGGSDIQMTQSPSSLSASVGDRVTITCRASQDVNTAVAWYQQK
PGKAPKLLIYSASFLYSGVPSRFSGSRSGTDFTLTISSLQPEDFATYYCQQHYTTPPTFGQG
TKVEIK
SEQ ID NO: 83:
DASLPYLQKESVFQSGAHAYRIPALLYLPGQQSLLAFAEQRASKKDEHAELIVLRRGDYDAN
THQVQWQAQEVVAQARLDGHRSMNPCPLYDAQTGTLFLFFIAIPGQVTEQQQLQTRANVTRL
CQVTSTDHGRTWSSPRDLTDAAIGPAYREWSTFAVGPGHCLQLHDRARSLVVPAYAYRKLHP
KQRPIPSAFCFLSHDHGRTWARGHFVAQDTLECQVAEVETGEQRVVTLNARSHLRARVQAQS
TNDGLDFQESQLVKKLVEPPPAGCQGSVISFPSPRSGPGSPAQWLLYTHPTHRKQRADLGAY
LNPRPPAPEAWSEPVLLAKGSAAYSDLQSMGTGPDGSPLFGCLYEANDYEEIVFLMFTLKQA
FPAEYLPQGGGGSGGGGSDKTHTCPPCPAPELLGGPSVELFPPKPKDTLMISRTPEVTCVVV
DVSHEDPEVKFNWYVDGVEVHNAKTKPREEQYNSTYRVVSVLTVLHQDWLNGKEYKCKVSNK
ALPAPIEKTISKAKGQPREPQVYTLPPSREEMTKNQVSLTCLVKGFYPSDIAVEWESNGQPE
NNYKTTPPVLDSDGSFFLYSKLTVDKSRWQQGNVFSCSVMHEALHNHYTQKSLSLSPGKGGG
GSGGGGSGGGGSEVQLVESGGGLVQPGGSLRLSCAASGFNIKDTYIHWVRQAPGKGLEWVAR
IYPTNGYTRYADSVKGRFTISADTSKNTAYLQMNSLRAEDTAVYYCSRWGGDGFYAMDYWGQ
GTLVTVSSGGGGSGGGGSGGGGSDIQMTQSPSSLSASVGDRVTITCRASQDVNTAVAWYQQK
PGKAPKLLIYSASFLYSGVPSRFSGSRSGTDFTLTISSLQPEDFATYYCQQHYTTPPTFGQG
TKVEIK
SEQ ID NO: 84:
X₁ASLPX₂LQX₃ESVFQSGAHAYRIPALLYLPGQQSLLAFAEQRASKKDEHAELIVLRRGDYD
AX₄THQVQWQAQEVVAQARLDGHRSMNPCPLYDX₅QTGTLFLFFIAIPGQVTEQQQLQTRANV
TRLCQVTSTDHGRTWSSPRDLTDAAIGPAYREWSTFAVGPGHCLQLHDRARSLVVPAYAYRK
LHPX₆QRPIPSAFCFLSHDHGRTWARGHFVAQDTLECQVAEVETGEQRVVTLNARSHLRARV
QAQSTNDGLDFQESQLVKKLVEPPPX₇GCQGSVISFPSPRSGPGSPAQWLLYTHPTHX₈X₉QR
ADLGAYLNPRPPAPEAWSEPVLLAKGSX₁₀AYSDLQSMGTGPDGSPLFGCLYEANDYEEIX₁₁
FX₁₂MFTLKQAFPAEYLPQGGGGSGGGGSDKTHTCPPCPAPELLGGPSVFLFPPKPKDTLMIS
RTPEVTCVVVDVSHEDPEVKFNWYVDGVEVHNAKTKPREEQYNSTYRVVSVLTVLHQDWLNG
KEYKCKVSNKALPAPIEKTISKAKGQPREPQVYTLPPSREEMTKNQVSLTCLVKGFYPSDIA
VEWESNGQPENNYKTTPPVLDSDGSFFLYSKLTVDKSRWQQGNVFSCSVMHEALHNHYTQKS
LSLSPGKGGGGSGGGGSGGGGSEVQLVESGGGLVQPGGSLRLSCAASGFNIKDTYIHWVRQA
PGKGLEWVARIYPTNGYTRYADSVKGRFTISADTSKNTAYLQMNSLRAEDTAVYYCSRWGGD
GFYAMDYWGQGTLVTVSSGGGGSGGGGSGGGGSDIQMTQSPSSLSASVGDRVTITCRASQDV
NTAVAWYQQKPGKAPKLLIYSASFLYSGVPSRFSGSRSGTDFTLTISSLQPEDFATYYCQQH
YTTPPTFGQGTKVEIK
SEQ ID NO: 85:
X₁X₂SX₃X₄X₅LQX₆ESVFQSGAHAYRIPALLYLPGQQSLLAFAEQRASX₇X₈DEHAELIVX₉RR
GDYDAX₁₀THQVQWX₁₁AQEVVAQAX₁₂LDGHRSMNPCPLYDX₁₃QTGTLFLFFIAIPX₁₄X₁₅VT
EX₁₆QQLQTRANVTRLX₁₇X₁₈VTSTDHGRTWSSPRDLTDAAIGPX₁₉YREWSTFAVGPGHX₂₀L
QLHDRX₂₁RSLVVPAYAYRKLHPX₂₂QRPIPSAFX₂₃FLSHDHGRTWARGHFVAQDTX₂₄ECQVA
EVETGEQRVVTLNARSHLRARVQAQSX₂₅NX₂₆GLDFQX₂₇SQLVKKLVEPPPX₂₈GX₂₉QGSVI
SFPSPRSGPGSPAQX₃₀LLYTHPTHX₃₁X₃₂QRADLGAYLNPRPPAPEAWSEPX₃₃LLAKGSX₃₄
AYSDLQSMGTGPDGSPLFGX₃₅LYEANDYEEIX₃₆FX₃₇MFTLKQAFPAEYLPQGGGGSGGGGS
DKTHTCPPCPAPELLGGPSVFLFPPKPKDTLMISRTPEVTCVVVDVSHEDPEVKFNWYVDGV
EVHNAKTKPREEQYNSTYRVVSVLTVLHQDWLNGKEYKCKVSNKALPAPIEKTISKAKGQPR
EPQVYTLPPSREEMTKNQVSLTCLVKGFYPSDIAVEWESNGQPENNYKTTPPVLDSDGSFFL
YSKLTVDKSRWQQGNVFSCSVMHEALHNHYTQKSLSLSPGKGGGGSGGGGSGGGGSEVQLVE
SGGGLVQPGGSLRLSCAASGFNIKDTYIHWVRQAPGKGLEWVARIYPTNGYTRYADSVKGRF
TISADTSKNTAYLQMNSLRAEDTAVYYCSRWGGDGFYAMDYWGQGTLVTVSSGGGGSGGGGS
GGGGSDIQMTQSPSSLSASVGDRVTITCRASQDVNTAVAWYQQKPGKAPKLLIYSASFLYSG
VPSRFSGSRSGTDFTLTISSLQPEDFATYYCQQHYTTPPTFGQGTKVEIK
SEQ ID NO: 86:
GACATCCAGATGACACAGAGCCCTAGCAGCCTGTCTGCCAGCGTGGGAGACAGAGTGACCAT
CACCTGTAGAGCCAGCCAGGACGTGAACACAGCCGTGGCTTGGTATCAGCAGAAGCCTGGCA
AGGCCCCTAAGCTGCTGATCTACAGCGCCAGCTTTCTGTACTCCGGCGTGCCCAGCAGATTC
AGCGGCTCTAGAAGCGGCACCGACTTCACCCTGACCATAAGCAGTCTGCAGCCCGAGGACTT
CGCCACCTACTACTGTCAGCAGCACTACACCACACCTCCAACCTTTGGCCAGGGCACCAAGG
TGGAAATCAAGCGTACGGTGGCTGCACCATCTGTCTTCATCTTCCCGCCATCTGATGAGCAG
TTGAAATCTGGAACTGCCTCTGTTGTGTGCCTGCTGAATAACTTCTATCCCAGAGAGGCCAA
AGTACAGTGGAAGGTGGATAACGCCCTCCAATCGGGTAACTCCCAGGAGAGTGTCACAGAGC
AGGACAGCAAGGACAGCACCTACAGCCTCAGCAGCACCCTGACGCTGAGCAAAGCAGACTAC
GAGAAACACAAAGTCTACGCCTGCGAAGTCACCCATCAGGGCCTGAGCTCGCCCGTCACAAA
GAGCTTCAACAGGGGAGAGTGT
SEQ ID NO: 87:
GAGGTGCAGCTGGTTGAATCTGGCGGAGGACTGGTTCAGCCTGGCGGATCTCTGAGACTGTC
TTGTGCCGCCAGCGGCTTCAACATCAAGGACACCTACATCCACTGGGTCCGACAGGCCCCTG
GCAAAGGACTTGAATGGGTCGCCAGAATCTACCCCACCAACGGCTACACCAGATACGCCGAC
TCTGTGAAGGGCAGATTCACCATCAGCGCCGACACCAGCAAGAACACCGCCTACCTGCAGAT
GAACAGCCTGAGAGCCGAGGACACCGCCGTGTACTACTGTTCTAGATGGGGAGGCGACGGCT
TCTACGCCATGGATTATTGGGGCCAGGGCACCCTGGTCACCGTTTCTTCTGCtagcACCAAG
GGCCCATCcGTCTTCCCCCTGGCACCCTCCTCCAAGAGCACCTCTGGGGGCACAGCGGCCCT
GGGCTGCCTGGTCAAGGACTACTTCCCCGAACCGGTGACGGTGTCcTGGAACTCAGGCGCtC
TGACCAGCGGCGTGCACACCTTCCCGGCTGTCCTACAGTCCTCAGGACTCTACTCCCTCAGC
AGCGTGGTGACCGTGCCCTCCAGCAGCTTGGGCACCCAGACCTACATCTGCAACGTGAATCA
CAAGCCGAGCAACACCAAGGTGGAGAAGAAAGTTGAGCCCAAATCTTGTGAGAAAACTCACA
CATGCCCACCGTGCCCAGCACCTGAACTCCTGGGGGGACCGTCAGTCTTCCTCTTCCCCCCA
AAACCCAAGGACACCCTCATGATCTCCCGGACCCCTGAGGTCACATGCGTGGTGGTGGACGT
GAGCCACGAAGACCCTGAGGTCAAGTTCAACTGGTACGTGGACGGCGTGGAGGTGCATAATG
CCAAGACAAAGCCGCGGGAGGAGCAGTACAACAGCACGTACCGTGTGGTCAGCGTCCTCACC
GTCCTGCACCAGGACTGGCTGAATGGCAAGGAGTACAAGTGCAAGGTCTCCAACAAAGCCCT
CCCAGCCCCCATCGAGAAAACCATCTCCAAAGCCAAAGGGCAGCCCCGAGAACCACAGGTcT
ACACCCTGCCCCCATCCCGGGAGGAGATGACCAAGAACCAGGTCAGCCTGtacTGCCTGGTC
AAAGGCTTCTATCCCAGCGACATCGCCGTGGAGTGGGAGAGCAATGGGCAGCCGGAGAACAA
CTACAAGACCACGCCTCCCGTGCTGGACTCCGACGGCTCCTTCTTCCTCTATAGCAAGCTCA
CCGTGGACAAGAGCAGGTGGCAGCAGGGGAACGTCTTCTCATGCTCCGTGATGCATGAGGCT
CTGCACAACCACTACACGCAGAAGAGCCTCTCCCTGTCTCCGGGTAAA
SEQ ID NO: 88:
GATGCATCTCTGCCTTACCTGCAGAAAGAAAGCGTGTTCCAGTCTGGCGCCCACGCCTACAG
AATTCCCGCTCTGCTGTATCTGCCAGGCCAGCAGTCTCTGCTGGCTTTCGCTGAACAGCGGG
CCAGCAAGAAGGATGAGCACGCCGAACTGATCGTGCTGCGGAGAGGCGATTACGACGCCGGC
ACACATCAGGTGCAGTGGCAGGCTCAAGAGGTGGTGGCTCAGGCTAGACTGGACGGCCACAG
ATCTATGAACCCCTGTCCTCTGTACGATGAACAGACCGGCACACTGTTTCTGTTCTTTATCG
CTATCCCCGGCCAAGTGACCGAGCAGCAGCAGCTGCAGACAAGAGCCAACGTGACCAGACTG
TGTCAAGTGACCTCCACCGACCACGGCAGAACCTGGTCTAGCCCTAGAGATCTGACCGACGC
CGCCATCGGACCTGCCTATAGAGAGTGGTCCACCTTCGCCGTTGGACCTGGACACTGTCTCC
AGCTGCACGACAGGGCTAGATCTCTGGTGGTGCCTGCCTACGCCTATAGAAAGCTGCACCCC
AAACAGCGGCCTATTCCTAGCGCCTTCTGCTTTCTGAGCCACGATCACGGCAGGACATGGGC
CAGAGGACATTTCGTGGCCCAGGACACACTGGAATGCCAGGTGGCCGAAGTGGAAACCGGCG
AGCAGAGAGTCGTGACCCTGAACGCCAGATCTCACCTGAGAGCCAGAGTGCAGGCCCAGAGC
ACAAACGACGGCCTGGATTTCCAAGAGAGCCAGCTGGTCAAGAAACTGGTGGAACCTCCTCC
ACAGGGCTGTCAGGGAAGCGTGATCAGCTTTCCATCTCCTAGAAGCGGCCCTGGCTCTCCTG
CTCAGTGGCTGCTGTATACACACCCCACACACAGCTGGCAGAGAGCCGATCTGGGCGCCTAC
CTGAATCCTAGACCTCCTGCTCCTGAGGCTTGGAGCGAACCTGTTCTGCTGGCCAAGGGCAG
CGCTGCCTACAGCGATCTGCAGTCTATGGGCACAGGCCCTGATGGCAGCCCTCTGTTTGGCT
GTCTGTACGAGGCCAACGACTACGAAGAGATCGTGTTCCTGATGTTCACCCTGAAGCAGGCC
TTTCCAGCCGAGTACCTGCCTCAAGGCGGAGGTGGAAGTGGCGGAGGCGGATCCGACAAAAC
TCACACATGCCCACCGTGCCCAGCACCTGAACTCCTGGGGGGACCGTCAGTCTTCCTCTTCC
CCCCAAAACCCAAGGACACCCTCATGATCTCCCGGACCCCTGAGGTCACATGCGTGGTGGTG
GACGTGAGCCACGAAGACCCTGAGGTCAAGTTCAACTGGTACGTGGACGGCGTGGAGGTGCA
TAATGCCAAGACAAAGCCGCGGGAGGAGCAGTACAACAGCACGTACCGTGTGGTCAGCGTCC
TCACCGTCCTGCACCAGGACTGGCTGAATGGCAAGGAGTACAAGTGCAAGGTCTCCAACAAA
GCCCTCCCAGCCCCCATCGAGAAAACCATCTCCAAAGCCAAAGGGCAGCCCCGAGAACCACA
GGTCTACACCCTGCCCCCATCCCGGGAGGAGATGACCAAGAACCAGGTCAGCCTGACCTGCC
TGGTCAAAGGCTTCTATCCCAGCGACATCGCCGTGGAGTGGGAGAGCAATGGGCAGCCGGAG
AACAACTACAAGACCACGCCTCCCGTGCTGGACTCCGACGGCTCCTTCTTCCTCACTAGCAA
GCTCACCGTGGACAAGAGCAGGTGGCAGCAGGGGAACGTCTTCTCATGCTCCGTGATGCATG
AGGCTCTGCACAACCACTACACGCAGAAGAGCCTCTCCCTGTCTCCGGGTAAA
SEQ ID NO: 89:
GATGCATCTCTGCCTTACCTGCAGAAAGAAAGCGTGTTCCAGTCTGGCGCCCACGCCTACAG
AATTCCCGCTCTGCTGTATCTGCCAGGCCAGCAGTCTCTGCTGGCTTTCGCTGAACAGCGGG
CCAGCAAGAAGGATGAGCACGCCGAACTGATCGTGCTGCGGAGAGGCGATTACGACGCCGGC
ACACATCAGGTGCAGTGGCAGGCTCAAGAGGTGGTGGCTCAGGCTAGACTGGACGGCCACAG
ATCTATGAACCCCTGTCCTCTGTACGATGAACAGACCGGCACACTGTTTCTGTTCTTTATCG
CTATCCCCGGCCAAGTGACCGAGCAGCAGCAGCTGCAGACAAGAGCCAACGTGACCAGACTG
TGTCAAGTGACCTCCACCGACCACGGCAGAACCTGGTCTAGCCCTAGAGATCTGACCGACGC
CGCCATCGGACCTGCCTATAGAGAGTGGTCCACCTTCGCCGTTGGACCTGGACACTGTCTCC
AGCTGCACGACAGGGCTAGATCTCTGGTGGTGCCTGCCTACGCCTATAGAAAGCTGCACCCC
AAACAGCGGCCTATTCCTAGCGCCTTCTGCTTTCTGAGCCACGATCACGGCAGGACATGGGC
CAGAGGACATTTCGTGGCCCAGGACACACTGGAATGCCAGGTGGCCGAAGTGGAAACCGGCG
AGCAGAGAGTCGTGACCCTGAACGCCAGATCTCACCTGAGAGCCAGAGTGCAGGCCCAGAGC
ACAAACGACGGCCTGGATTTCCAAGAGAGCCAGCTGGTCAAGAAACTGGTGGAACCTCCTCC
ACAGGGCTGTCAGGGAAGCGTGATCAGCTTTCCATCTCCTAGAAGCGGCCCTGGCTCTCCTG
CTCAGTGGCTGCTGTATACACACCCCACACACAGCTGGCAGAGAGCCGATCTGGGCGCCTAC
CTGAATCCTAGACCTCCTGCTCCTGAGGCTTGGAGCGAACCTGTTCTGCTGGCCAAGGGCAG
CGCTGCCTACAGCGATCTGCAGTCTATGGGCACAGGCCCTGATGGCAGCCCTCTGTTTGGCT
GTCTGTACGAGGCCAACGACTACGAAGAGATCGTGTTCCTGATGTTCACCCTGAAGCAGGCC
TTTCCAGCCGAGTACCTGCCTCAA
SEQ ID NO: 90:
TVEKSVVFKAEGEHFTDQKGNTIVGSGSGGTTKYFRIPAMCTTSKGTIVVFADARHNTASDQ
SFIDTAAARSTDGGKTWNKKIAIYNDRVNSKLSRVMDPTCIVANIQGRETILVMVGKWNNND
KTWGAYRDKAPDTDWDLVLYKSTDDGVTFSKVETNIHDIVTKNGTISAMLGGVGSGLQLNDG
KLVFPVQMVRTKNITTVLNTSFIYSTDGITWSLPSGYCEGFGSENNIIEFNASLVNNIRNSG
LRRSFETKDFGKTWTEFPPMDKKVDNRNHGVQGSTITIPSGNKLVAAHSSAQNKNNDYTRSD
ISLYAHNLYSGEVKLIDDFYPKVGNASGAGYSCLSYRKNVDKETLYVVYEANGSIEFQDLSR
HLPVIKSYNGGGGSGGGGSDKTHTCPPCPAPELLGGPSVFLFPPKPKDTLMISRTPEVTCVV
VDVSHEDPEVKFNWYVDGVEVHNAKTKPREEQYNSTYRVVSVLTVLHQDWLNGKEYKCKVSN
KALPAPIEKTISKAKGQPREPQVYTLPPSREEMTKNQVSLTCLVKGFYPSDIAVEWESNGQP
ENNYKTTPPVLDSDGSFFLTSKLTVDKSRWQQGNVFSCSVMHEALHNHYTQKSLSLSPGK
SEQ ID NO: 91:
ACAGTGGAAAAGTCCGTGGTGTTCAAGGCCGAGGGCGAGCACTTCACCGACCAGAAAGGCAA
TACCATCGTCGGCTCTGGCAGCGGCGGCACCACCAAGTACTTTAGAATCCCCGCCATGTGCA
CCACCAGCAAGGGCACCATTGTGGTGTTCGCCGACGCCAGACACAACACCGCCAGCGATCAG
AGCTTCATCGATACCGCTGCCGCCAGATCTACCGATGGCGGCAAGACCTGGAACAAGAAGAT
CGCCATCTACAACGACCGCGTGAACAGCAAGCTGAGCAGAGTGATGGACCCTACCTGCATCG
TGGCCAACATCCAGGGCAGAGAAACCATCCTGGTCATGGTCGGAAAGTGGAACAACAACGAT
AAGACCTGGGGCGCCTACAGAGACAAGGCCCCTGATACCGATTGGGACCTCGTGCTGTACAA
GAGCACCGATGACGGCGTGACCTTCAGCAAGGTGGAAACAAACATCCACGACATCGTGACCA
AGAACGGCACCATCTCTGCCATGCTCGGCGGCGTTGGATCTGGCCTGCAACTGAATGATGGC
AAGCTGGTGTTCCCCGTGCAGATGGTCCGAACAAAGAATATCACCACCGTGCTGAATACCAG
CTTCATCTACAGCACCGACGGCATCACATGGTCCCTGCCTAGCGGCTACTGTGAAGGCTTTG
GCAGCGAGAACAACATCATCGAGTTCAACGCCAGCCTGGTCAACAACATCCGGAACAGCGGC
CTGCGGAGAAGCTTCGAGACAAAGGACTTCGGAAAGACGTGGACCGAGTTTCCTCCAATGGA
CAAGAAGGTGGACAACCGGAACCACGGCGTGCAGGGCAGCACAATCACAATCCCTAGCGGCA
ACAAACTGGTGGCCGCTCACTCTAGCGCCCAGAACAAGAACAACGACTACACCAGAAGCGAC
ATCAGCCTGTACGCCCACAACCTGTACAGCGGCGAAGTGAAGCTGATCGACGACTTCTACCC
CAAAGTGGGCAATGCCAGCGGAGCCGGCTACAGCTGTCTGAGCTACCGGAAAAATGTGGACA
AAGAAACCCTGTACGTGGTGTACGAGGCCAACGGCAGCATCGAGTTTCAGGACCTGAGCAGA
CATCTGCCCGTGATCAAGAGCTACAACggcggaggtggaagtggcggaggcggatccgacaa
aactcacacatgcccaccgtgcccagcacctgaactcctggggggaccgtcagtcttcctct
tccccccaaaacccaaggacaccctcatgatctcccggacccctgaggtcacatgcgtggtg
gtggacgtgagccacgaagaccctgaggtcaagttcaactggtacgtggacggcgtggaggt
gcataatgccaagacaaagccgcgggaggagcagtacaacagcacgtaccgtgtggtcagcg
tcctcaccgtcctgcaccaggactggctgaatggcaaggagtacaagtgcaaggtctccaac
aaagccctcccagcccccatcgagaaaaccatctccaaagccaaagggcagccccgagaacc
acaggtctacaccctgcccccatcccgggaggagatgaccaagaaccaggtcagcctgacct
gcctggtcaaaggcttctatcccagcgacatcgccgtggagtgggagagcaatgggcagccg
gagaacaactacaagaccacgcctcccgtgctggactccgacggctccttcttcctcactag
caagctcaccgtggacaagagcaggtggcagcaggggaacgtcttctcatgctccgtgatgc
atgaggctctgcacaaccactacacgcagaagagcctctccctgtctccgggtaaa
SEQ ID NO: 92:
EVQLVESGGGLVQPGGSLRLSCAASGFNIKDTYIHWVRQAPGKGLEWVARIYPTNGYTRYAD
SVKGRFTISADTSKNTAYLQMNSLRAEDTAVYYCSRWGGDGFYAMDYWGQGTLVTVSSASTK
GPSVFPLAPSSKSTSGGTAALGCLVKDYFPEPVTVSWNSGALTSGVHTFPAVLQSSGLYSLS
SVVTVPSSSLGTQTYICNVNHKPSNTKVDKKVEPKSCDKTHTCPPCPAPELLGGPSVFLFPP
KPKDTLMISRTPEVTCVVVDVSHEDPEVKFNWYVDGVEVHNAKTKPREEQYNSTYRVVSVLT
VLHQDWLNGKEYKCKVSNKALPAPIEKTISKAKGQPREPQVYTLPPSREEMTKNQVSLTCLV
KGEYPSDIAVEWESNGQPENNYKTTPPVLDSDGSFFLYSKLTVDKSRWQQGNVFSCSVMHEA
LHNHYTQKSLSLSPGKGGGGSGGGGSGGGGSTVEKSVVFKAEGEHFTDOKGNTIVGSGSGGT
TKYFRIPAMCTTSKGTIVVFADARHNTASDQSFIDTAAARSTDGGKTWNKKIAIYNDRVNSK
LSRVMDPTCIVANIQGRETILVMVGKWNNNDKTWGAYRDKAPDTDWDLVLYKSTDDGVTFSK
VETNIHDIVTKNGTISAMLGGVGSGLQLNDGKLVFPVOMVRTKNITTVLNTSFIYSTDGITW
SLPSGYCEGFGSENNIIEFNASLVNNIRNSGLRRSFETKDFGKTWTEFPPMDKKVDNRNHGV
QGSTITIPSGNKLVAAHSSAQNKNNDYTRSDISLYAHNLYSGEVKLIDDFYPKVGNASGAGY
SCLSYRKNVDKETLYVVYEANGSIEFQDLSRHLPVIKSYN
SEQ ID NO: 93:
gaggtgcagctggttgaatctggcggaggactggttcagcctggcggatctctgagactgtc
ttgtgccgccagcggcttcaacatcaaggacacctacatccactgggtccgacaggcccctg
gcaaaggacttgaatgggtcgccagaatctaccccaccaacggctacaccagatacgccgac
tctgtgaagggcagattcaccatcagcgccgacaccagcaagaacaccgcctacctgcagat
gaacagcctgagagccgaggacaccgccgtgtactactgttctagatggggaggcgacggct
tctacgccatggattattggggccagggcaccctggtcaccgtttcttctgctagcaccaag
ggcccatccgtcttccccctggcaccctcctccaagagcacctctgggggcacagcggccct
gggctgcctggtcaaggactacttccccgaaccggtgacggtgtcctggaactcaggcgctc
tgaccagcggcgtgcacaccttcccggctgtcctacagtcctcaggactctactccctcage
agcgtggtgaccgtgccctccagcagcttgggcacccagacctacatctgcaacgtgaatca
caagcccagcaacaccaaggtggacaagaaagttgagcccaaatcttgtgacaaaactcaca
catgcccaccgtgcccagcacctgaactcctggggggaccgtcagtcttcctcttcccccca
aaacccaaggacaccctcatgatctcccggacccctgaggtcacatgcgtggtggtggacgt
gagccacgaagaccctgaggtcaagttcaactggtacgtggacggcgtggaggtgcataatg
ccaagacaaagccgcgggaggagcagtacaacagcacgtaccgtgtggtcagcgtcctcacc
gtcctgcaccaggactggctgaatggcaaggagtacaagtgcaaggtctccaacaaagccct
cccagcccccatcgagaaaaccatctccaaagccaaagggcagccccgagaaccacaggtct
acaccctgcccccatcccgggaggagatgaccaagaaccaggtcagcctgacctgcctggtc
aaaggcttctatcccagcgacatcgccgtggagtgggagagcaatgggcagccggagaacaa
ctacaagaccacgcctcccgtgctggactccgacggctccttcttcctctatagcaagctca
ccgtggacaagagcaggtggcagcaggggaacgtcttctcatgctccgtgatgcatgaggct
ctgcacaaccactacacgcagaagagcctctccctgtctccgggtaaaggtggcggaggatc
tggcggaggtggaagcggcggaggcggatctacagtggaaaagtccgtggtgttcaaggccg
agggcgagcacttcaccgaccagaaaggcaataccatcgtcggctctggcagcggcggcacc
accaagtactttagaatccccgccatgtgcaccaccagcaagggcaccattgtggtgttcgc
cgacgccagacacaacaccgccagcgatcagagcttcatcgataccgctgccgccagaagta
cagacggcggcaagacctggaacaagaagatcgccatctacaacgaccgcgtgaacagcaag
ctgagcagagtgatggaccctacctgcatcgtggccaacatccagggcagagaaaccatcct
ggtcatggtcggaaagtggaacaacaacgataagacctggggcgcctacagagacaaggccc
ctgataccgattgggacctcgtgctgtataagagcaccgacgacggcgtgaccttcagcaag
gtggaaacaaacatccacgacatcgtgaccaagaacggcaccatctctgccatgeteggegg
cgttggatctggcctgcaactgaatgatggcaagctggtgttccccgtgcagatggtccgaa
caaagaacatcaccaccgtgctgaataccagcttcatctactccaccgacggcatcacatgg
tccctgcctagcggctactgtgaaggctttggcagcgagaacaacatcatcgagttcaacgc
cagcctggtcaacaacatccggaacagcggcctgcggagaagcttcgagacaaaggacttcg
gaaagacgtggaccgagtttcctccaatggacaagaaggtggacaaccggaaccacggcgtg
cagggcagcacaatcacaatccctagcggcaacaaactggtggccgctcactctagcgccca
gaacaagaacaacgattacaccagaagcgacatcagcctgtacgcccacaacctgtactccg
gcgaagtgaagctgatcgacgacttctaccccaaagtgggcaatgccagcggagccggctac
agetgtctgagetaccggaaaaatgtggacaaagaaaccctgtacgtggtgtacgaggccaa
cggcagcatcgagtttcaggacctgagcagacatctgcccgtgatcaagagctacaat
SEQ ID NO: 94:
TVEKSVVFKAEGEHFTDQKGNTIVGSGSGGTTKYFRIPAMCTTSKGTIVVFADARHNTASDQ
SFIDTAAARSTDGGKTWNKKIAIYNDRVNSKLSRVMDPTCIVANIQGRETILVMVGKWNNND
KTWGAYRDKAPDTDWDLVLYKSTDDGVTFSKVETNIHDIVTKNGTISAMLGGVGSGLQLNDG
KLVFPVQMVRTKNITTVLNTSFIYSTDGITWSLPSGYCEGFGSENNIIEFNASLVNNIRNSG
LRRSFETKDFGKTWTEFPPMDKKVDNRNHGVQGSTITIPSGNKLVAAHSSAQNKNNDYTRSD
ISLYAHNLYSGEVKLIDDFYPKVGNASGAGYSCLSYRKNVDKETLYVVYEANGSIEFQDLSR
HLPVIKSYNGGGGSGGGGSDKTHTCPPCPAPELLGGPSVFLFPPKPKDTLMISRTPEVTCVV
VDVSHEDPEVKFNWYVDGVEVHNAKTKPREEQYNSTYRVVSVLTVLHQDWLNGKEYKCKVSN
KALPAPIEKTISKAKGQPREPQVYTLPPSREEMTKNQVSLTCLVKGFYPSDIAVEWESNGQP
ENNYKTTPPVLDSDGSFFLYSKLTVDKSRWQQGNVFSCSVMHEALHNHYTQKSLSLSPGKGG
GGSGGGGSGGGGSEVQLVESGGGLVQPGGSLRLSCAASGFNIKDTYIHWVRQAPGKGLEWVA
RIYPTNGYTRYADSVKGRFTISADTSKNTAYLQMNSLRAEDTAVYYCSRWGGDGFYAMDYWG
QGTLVTVSSGGGGSGGGGSGGGGSDIQMTQSPSSLSASVGDRVTITCRASQDVNTAVAWYQQ
KPGKAPKLLIYSASFLYSGVPSRFSGSRSGTDFTLTISSLQPEDFATYYCQQHYTTPPTFGQ
GTKVEIK
SEQ ID NO: 95:
ACAGTGGAAAAGTCCGTGGTGTTCAAGGCCGAGGGCGAGCACTTCACCGACCAGAAAGGCAA
TACCATCGTCGGCTCTGGCAGCGGCGGCACCACCAAGTACTTTAGAATCCCCGCCATGTGCA
CCACCAGCAAGGGCACCATTGTGGTGTTCGCCGACGCCAGACACAACACCGCCAGCGATCAG
AGCTTCATCGATACCGCTGCCGCCAGATCTACCGATGGCGGCAAGACCTGGAACAAGAAGAT
CGCCATCTACAACGACCGCGTGAACAGCAAGCTGAGCAGAGTGATGGACCCTACCTGCATCG
TGGCCAACATCCAGGGCAGAGAAACCATCCTGGTCATGGTCGGAAAGTGGAACAACAACGAT
AAGACCTGGGGCGCCTACAGAGACAAGGCCCCTGATACCGATTGGGACCTCGTGCTGTACAA
GAGCACCGATGACGGCGTGACCTTCAGCAAGGTGGAAACAAACATCCACGACATCGTGACCA
AGAACGGCACCATCTCTGCCATGCTCGGCGGCGTTGGATCTGGCCTGCAACTGAATGATGGC
AAGCTGGTGTTCCCCGTGCAGATGGTCCGAACAAAGAATATCACCACCGTGCTGAATACCAG
CTTCATCTACAGCACCGACGGCATCACATGGTCCCTGCCTAGCGGCTACTGTGAAGGCTTTG
GCAGCGAGAACAACATCATCGAGTTCAACGCCAGCCTGGTCAACAACATCCGGAACAGCGGC
CTGCGGAGAAGCTTCGAGACAAAGGACTTCGGAAAGACGTGGACCGAGTTTCCTCCAATGGA
CAAGAAGGTGGACAACCGGAACCACGGCGTGCAGGGCAGCACAATCACAATCCCTAGCGGCA
ACAAACTGGTGGCCGCTCACTCTAGCGCCCAGAACAAGAACAACGACTACACCAGAAGCGAC
ATCAGCCTGTACGCCCACAACCTGTACAGCGGCGAAGTGAAGCTGATCGACGACTTCTACCC
CAAAGTGGGCAATGCCAGCGGAGCCGGCTACAGCTGTCTGAGCTACCGGAAAAATGTGGACA
AAGAAACCCTGTACGTGGTGTACGAGGCCAACGGCAGCATCGAGTTTCAGGACCTGAGCAGA
CATCTGCCCGTGATCAAGAGCTACAACGGCGGAGGTGGAAGTGGCGGAGGCGGATCcGACAA
AACTCACACATGCCCACCGTGCCCAGCACCTGAACTCCTGGGGGGACCGTCAGTCTTCCTCT
TCCCCCCAAAACCCAAGGACACCCTCATGATCTCCCGGACCCCTGAGGTCACATGCGTGGTG
GTGGACGTGAGCCACGAAGACCCTGAGGTCAAGTTCAACTGGTACGTGGACGGCGTGGAGGT
GCATAATGCCAAGACAAAGCCGCGGGAGGAGCAGTACAACAGCACGTACCGTGTGGTCAGCG
TCCTCACCGTCCTGCACCAGGACTGGCTGAATGGCAAGGAGTACAAGTGCAAGGTCTCCAAC
AAAGCCCTCCCAGCCCCCATCGAGAAAACCATCTCCAAAGCCAAAGGGCAGCCCCGAGAACC
ACAGGTcTACACCCTGCCCCCATCCCGGGAGGAGATGACCAAGAACCAGGTCAGCCTGACCT
GCCTGGTCAAAGGCTTCTATCCCAGCGACATCGCCGTGGAGTGGGAGAGCAATGGGCAGCCG
GAGAACAACTACAAGACCACGCCTCCCGTGCTGGACTCCGACGGCTCCTTCTTCCTCTATAG
CAAGCTCACCGTGGACAAGAGCAGGTGGCAGCAGGGGAACGTCTTCTCATGCTCCGTGATGC
ATGAGGCTCTGCACAACCACTACACGCAGAAGAGCCTCTCCCTGTCTCCGGGTAAAGGAGGC
GGAGGATCTGGCGGAGGTGGAAGTGGCGGAGGCGGATCTGAGGTGCAGCTGGTTGAATCTGG
CGGAGGACTGGTTCAGCCTGGCGGATCTCTGAGACTGTCTTGTGCCGCCAGCGGCTTCAACA
TCAAGGACACCTACATCCACTGGGTCCGACAGGCCCCTGGCAAAGGACTTGAATGGGTCGCC
AGAATCTACCCCACCAACGGCTACACCAGATACGCCGACTCTGTGAAGGGCAGATTCACCAT
CAGCGCCGACACCAGCAAGAACACCGCCTACCTGCAGATGAACAGCCTGAGAGCCGAGGACA
CCGCCGTGTACTACTGTTCTAGATGGGGAGGCGACGGCTTCTACGCCATGGATTATTGGGGC
CAGGGCACCCTGGTCACCGTTTCTTCTGGCGGAGGAGGATCTGGCGGAGGCGGAAGTGGCGG
AGGCGGATCTGACATCCAGATGACACAGAGCCCTAGCAGCCTGTCTGCCAGCGTGGGAGACA
GAGTGACCATCACCTGTAGAGCCAGCCAGGACGTGAACACAGCCGTGGCTTGGTATCAGCAG
AAGCCTGGCAAGGCCCCTAAGCTGCTGATCTACAGCGCCAGCTTTCTGTACTCCGGCGTGCC
CAGCAGATTCAGCGGCTCTAGAAGCGGCACCGACTTCACCCTGACCATAAGCAGTCTGCAGC
CCGAGGACTTCGCCACCTACTACTGTCAGCAGCACTACACCACACCTCCAACCTTTGGCCAG
GGCACCAAGGTGGAAATCAAG
SEQ ID NO: 96:
TVEKSVVFKAEGEHFTDQKGNTIVGSGSGGTTKYFRIPAMCTTSKGTIVVFADARHNTASDQ
SFIDTAAARSTDGGKTWNKKIAIYNDRVNSKLSRVMVPTCIVANIQGRETILVMVGKWNNND
KTWGAYRDKAPDTDWDLVLYKSTDDGVTFSKVETNIHDIVTKNGTISAMLGGVGSGLQLNDG
KLVFPVQMVRTKNITTVLNTSFIYSTDGITWSLPSGYCEGFGSVNNIIEFNASLVNNIRNSG
LRRSFETKDFGKTWTEFPPMDKKVDNRNHGVQGSTITIPSGNKLVAAHSSAQNKNNDYTRSD
ISLYAHNLYSGEVKLIDDFYPKVGNASGAGYSCLSYRKNVDKETLYVVYEANGSIEFQDLSR
HLPVIKSYNGGGGSGGGGSDKTHTCPPCPAPELLGGPSVFLFPPKPKDTLMISRTPEVTCVV
VDVSHEDPEVKFNWYVDGVEVHNAKTKPREEQYNSTYRVVSVLTVLHQDWLNGKEYKCKVSN
KALPAPIEKTISKAKGQPREPQVYTLPPSREEMTKNQVSLTCLVKGFYPSDIAVEWESNGQP
ENNYKTTPPVLDSDGSFFLTSKLTVDKSRWQQGNVFSCSVMHEALHNHYTQKSLSLSPGK
SEQ ID NO: 97:
acagtggaaaagtccgtggtgttcaaggccgagggcgagcacttcaccgaccagaaaggcaa
taccatcgtcggctctggcagcggcggcaccaccaagtactttagaatccccgccatgtgca
ccaccagcaagggcaccattgtggtgttcgccgacgccagacacaacaccgccagcgatcag
agcttcatcgataccgctgccgccagaagtacagacggcggcaagacctggaacaagaagat
cgccatctacaacgaccgcgtgaacagcaagctgagcagagtgatggtccctacctgcatcg
tggccaacatccagggcagagaaaccatcctggtcatggtcggaaagtggaacaacaacgat
aagacctggggcgcctacagagacaaggcccctgataccgattgggacctcgtgctgtataa
gagcaccgacgacggcgtgaccttcagcaaggtggaaacaaacatccacgacatcgtgacca
agaacggcaccatctctgccatgctcggcggcgttggatctggcctgcaactgaatgatggc
aagctggtgttccccgtgcagatggtccgaacaaagaacatcaccaccgtgctgaataccag
cttcatctactccaccgacggcatcacatggtccctgcctagcggctactgtgaaggctttg
gcagcgtgaacaacatcatcgagttcaacgccagcctggtcaacaacatccggaacagcggc
ctgcggagaagcttcgagacaaaggacttcggaaagacgtggaccgagtttcctccaatgga
caagaaggtggacaaccggaaccacggcgtgcagggcagcacaatcacaatccctagcggca
acaaactggtggccgctcactctagcgcccagaacaagaacaacgattacaccagaagcgac
atcagcctgtacgcccacaacctgtactccggcgaagtgaagctgatcgacgacttctaccc
caaagtgggcaatgccagcggagccggctacagctgtctgagctaccggaaaaatgtggaca
aagaaaccctgtacgtggtgtacgaggccaacggcagcatcgagtttcaggacctgagcaga
catctgcccgtgatcaagagctacaatggcggaggtggaagtggcggaggcggatccgacaa
aactcacacatgcccaccgtgcccagcacctgaactcctggggggaccgtcagtcttcctct
tccccccaaaacccaaggacaccctcatgatctcccggacccctgaggtcacatgcgtggtg
gtggacgtgagccacgaagaccctgaggtcaagttcaactggtacgtggacggcgtggaggt
gcataatgccaagacaaagccgcgggaggagcagtacaacagcacgtaccgtgtggtcagcg
tcctcaccgtcctgcaccaggactggctgaatggcaaggagtacaagtgcaaggtctccaac
aaagccctcccagcccccatcgagaaaaccatctccaaagccaaagggcagccccgagaacc
acaggtctacaccctgcccccatcccgggaggagatgaccaagaaccaggtcagcctgacct
gcctggtcaaaggcttctatcccagcgacatcgccgtggagtgggagagcaatgggcagccg
gagaacaactacaagaccacgcctcccgtgctggactccgacggctccttcttcctcactag
caagctcaccgtggacaagagcaggtggcagcaggggaacgtcttctcatgctccgtgatgc
atgaggctctgcacaaccactacacgcagaagagcctctccctgtctccgggtaaa
SEQ ID NO: 98:
ASLPYLQKESVFQSGAHAYRIPALLYLPGQQSLLAFAEQRASKKDEHAELIVLRRGDYDAPT
HQVQWQAQEVVAQARLDGHRSMNPCPLYDAQTGTLFLFFIAIPGQVTEQQQLQTRANVTRLC
QVTSTDHGRTWSSPRDLTDAAIGPAYREWSTFAVGPGHCLQLHDRARSLVVPAYAYRKLHPK
QRPIPSAFCFLSHDHGRTWARGHFVAQDTLECQVAEVETGEQRVVTLNARSHLRARVQAQST
NDGLDFQESQLVKKLVEPPPQGCQGSVISFPSPRSGPGSPAQWLLYTHPTHSWQRADLGAYL
NPRPPAPEAWSEPVLLAKGSCAYSDLQSMGTGPDGSPLFGCLYEANDYEEIVFLMFTLKQAF
PAEYLPQEPKSSDKTHTCPPCPAPELLGGPSVFLFPPKPKDTLMISRTPEVTCVVVDVSHED
PEVKFNWYVDGVEVHNAKTKPREEQYNSTYRVVSVLTVLHQDWLNGKEYKCKVSNKALPAPI
EKTISKAKGQPREPQVYTLPPSREEMTKNQVSLTCLVKGFYPSDIAVEWESNGQPENNYKTT
PPVLDSDGSFFLTSKLTVDKSRWQQGNVFSCSVMHEALHNHYTQKSLSLSPGK
SEQ ID NO: 99:
ASLPYLQKESVFQSGAHAYRIPALLYLPGQQSLLAFAEQRASKKDEHAELIVLRRGDYDAPT
HQVQWQAQEVVAQARLDGHRSMNPCPLYDAQTGTLFLFFIAIPGQVTEQQQLQTRANVTRLC
QVTSTDHGRTWSSPRDLTDAAIGPAYREWSTFAVGPGHCLQLHDRARSLVVPAYAYRKLHPK
QRPIPSAFCFLSHDHGRTWARGHFVAQDTLECQVAEVETGEQRVVTLNARSHLRARVQAQST
NDGLDFQESQLVKKLVEPPPQGCQGSVISFPSPRSGPGSPAQWLLYTHPTHSWQRADLGAYL
NPRPPAPEAWSEPVLLAKGSAAYSDLQSMGTGPDGSPLFGCLYEANDYEEIVFLMFTLKQAF
PAEYLPQEPKSSDKTHTCPPCPAPELLGGPSVFLFPPKPKDTLMISRTPEVTCVVVDVSHED
PEVKFNWYVDGVEVHNAKTKPREEQYNSTYRVVSVLTVLHQDWLNGKEYKCKVSNKALPAPI
EKTISKAKGQPREPQVYTLPPSREEMTKNQVSLTCLVKGFYPSDIAVEWESNGQPENNYKTT
PPVLDSDGSFFLTSKLTVDKSRWQQGNVFSCSVMHEALHNHYTQKSLSLSPGK
SEQ ID NO: 100:
AASLPYLQKESVFQSGAHAYRIPALLYLPGQQSLLAFAEQRASKKDEHAELIVLRRGDYDAP
THQVQWQAQEVVAQARLDGHRSMNPCPLYDAQTGTLFLFFIAIPGQVTEQQQLQTRANVTRL
CQVTSTDHGRTWSSPRDLTDAAIGPAYREWSTFAVGPGHCLQLHDRARSLVVPAYAYRKLHP
KQRPIPSAFCFLSHDHGRTWARGHFVAQDTLECQVAEVETGEQRVVTLNARSHLRARVQAQS
TNDGLDFQESQLVKKLVEPPPQGCQGSVISFPSPRSGPGSPAQWLLYTHPTHSWQRADLGAY
LNPRPPAPEAWSEPVLLAKGSAAYSDLQSMGTGPDGSPLFGCLYEANDYEEIVFLMETLKQA
FPAEYLPQEPKSSDKTHTCPPCPAPELLGGPSVFLFPPKPKDTLMISRTPEVTCVVVDVSHE
DPEVKFNWYVDGVEVHNAKTKPREEQYNSTYRVVSVLTVLHQDWLNGKEYKCKVSNKALPAP
IEKTISKAKGQPREPQVYTLPPSREEMTKNQVSLTCLVKGFYPSDIAVEWESNGQPENNYKT
TPPVLDSDGSFFLTSKLTVDKSRWQQGNVFSCSVMHEALHNHYTOKSLSLSPGK
SEQ ID NO: 101:
DASLPYLQKESVFQSGAHAYRIPALLYLPGQQSLLAFAEQRASKKDEHAELIVLRRGDYDAP
THQVQWQAQEVVAQARLDGHRSMNPCPLYDAQTGTLFLFFIAIPGQVTEQQQLQTRANVTRL
CQVTSTDHGRTWSSPRDLTDAAIGPAYREWSTFAVGPGHCLQLHDRARSLVVPAYAYRKLHP
KQRPIPSAFCFLSHDHGRTWARGHFVAQDTLECQVAEVETGEQRVVTLNARSHLRARVQAQS
TNDGLDFQESQLVKKLVEPPPQGCQGSVISFPSPRSGPGSPAQWLLYTHPTHSWQRADLGAY
LNPRPPAPEAWSEPVLLAKGSAAYSDLQSMGTGPDGSPLFGCLYEANDYEEIVFLMFTLKQA
FPAEYLPQEPKSSDKTHTCPPCPAPELLGGPSVFLFPPKPKDTLMISRTPEVTCVVVDVSHE
DPEVKFNWYVDGVEVHNAKTKPREEQYNSTYRVVSVLTVLHQDWLNGKEYKCKVSNKALPAP
IEKTISKAKGQPREPQVYTLPPSREEMTKNQVSLTCLVKGFYPSDIAVEWESNGQPENNYKT
TPPVLDSDGSFFLTSKLTVDKSRWQQGNVFSCSVMHEALHNHYTQKSLSLSPGK
SEQ ID NO: 102:
AASLPYLQKESVFQSGAHAYRIPALLYLPGQQSLLAFAEQRASKKDEHAELIVLRRGDYDAP
THQVQWQAQEVVAQARLDGHRSMNPCPLYDAQTGTLFLFFIAIPGQVTEQQQLQTRANVTRL
CQVTSTDHGRTWSSPRDLTDAAIGPAYREWSTFAVGPGHCLQLHDRARSLVVPAYAYRKLHP
KQRPIPSAFCFLSHDHGRTWARGHFVAQDTLECQVAEVETGEQRVVTLNARSHLRARVQAQS
TNDGLDFQESQLVKKLVEPPPQGCQGSVISFPSPRSGPGSPAQWLLYTHPTHSWQRADLGAY
LNPRPPAPEAWSEPVLLAKGSCAYSDLQSMGTGPDGSPLFGCLYEANDYEEIVFLMFTLKQA
FPAEYLPQEPKSSDKTHTCPPCPAPELLGGPSVFLFPPKPKDTLMISRTPEVTCVVVDVSHE
DPEVKFNWYVDGVEVHNAKTKPREEQYNSTYRVVSVLTVLHQDWLNGKEYKCKVSNKALPAP
IEKTISKAKGQPREPQVYTLPPSREEMTKNQVSLTCLVKGFYPSDIAVEWESNGQPENNYKT
TPPVLDSDGSFFLTSKLTVDKSRWQQGNVFSCSVMHEALHNHYTQKSLSLSPGK
SEQ ID NO: 103:
DASLPYLQKESVFQSGAHAYRIPALLYLPGQQSLLAFAEQRASKKDEHAELIVLRRGDYDAP
THQVQWQAQEVVAQARLDGHRSMNPCPLYDAQTGTLFLFFIAIPGQVTEQQQLQTRANVTRL
CQVTSTDHGRTWSSPRDLTDAAIGPAYREWSTFAVGPGHCLQLHDRARSLVVPAYAYRKLHP
KQRPIPSAFCFLSHDHGRTWARGHFVAQDTLECQVAEVETGEQRVVTLNARSHLRARVQAQS
TNDGLDFQESQLVKKLVEPPPQGCQGSVISFPSPRSGPGSPAQWLLYTHPTHSWQRADLGAY
LNPRPPAPEAWSEPVLLAKGSCAYSDLQSMGTGPDGSPLFGCLYEANDYEEIVFLMFTLKQA
FPAEYLPQEPKSSDKTHTCPPCPAPELLGGPSVFLFPPKPKDTLMISRTPEVTCVVVDVSHE
DPEVKFNWYVDGVEVHNAKTKPREEQYNSTYRVVSVLTVLHQDWLNGKEYKCKVSNKALPAP
IEKTISKAKGQPREPQVYTLPPSREEMTKNQVSLTCLVKGFYPSDIAVEWESNGQPENNYKT
TPPVLDSDGSFFLTSKLTVDKSRWQQGNVFSCSVMHEALHNHYTQKSLSLSPGK
SEQ ID NO: 104:
MASLPYLQKESVFQSGAHAYRIPALLYLPGQQSLLAFAEQRASKKDEHAELIVLRRGDYDAP
THQVQWQAQEVVAQARLDGHRSMNPCPLYDAQTGTLFLFFIAIPGQVTEQQQLQTRANVTRL
CQVTSTDHGRTWSSPRDLTDAAIGPAYREWSTFAVGPGHCLQLHDRARSLVVPAYAYRKLHP
KQRPIPSAFCELSHDHGRTWARGHEVAQDTLECQVAEVETGEQRVVTLNARSHLRARVQAQS
TNDGLDFQESQLVKKLVEPPPQGCQGSVISFPSPRSGPGSPAQWLLYTHPTHSWQRADLGAY
LNPRPPAPEAWSEPVLLAKGSCAYSDLQSMGTGPDGSPLFGCLYEANDYEEIVFLMFTLKQA
FPAEYLPQEPKSSDKTHTCPPCPAPELLGGPSVFLFPPKPKDTLMISRTPEVTCVVVDVSHE
DPEVKFNWYVDGVEVHNAKTKPREEQYNSTYRVVSVLTVLHQDWLNGKEYKCKVSNKALPAP
IEKTISKAKGQPREPQVYTLPPSREEMTKNQVSLTCLVKGFYPSDIAVEWESNGQPENNYKT
TPPVLDSDGSFFLTSKLTVDKSRWQQGNVFSCSVMHEALHNHYTOKSLSLSPGK
SEQ ID NO: 105:
MASLPYLQKESVFQSGAHAYRIPALLYLPGQQSLLAFAEQRASKKDEHAELIVLRRGDYDAP
THQVQWQAQEVVAQARLDGHRSMNPCPLYDAQTGTLFLFFIAIPGQVTEQQQLQTRANVTRL
CQVTSTDHGRTWSSPRDLTDAAIGPAYREWSTFAVGPGHCLQLHDRARSLVVPAYAYRKLHP
KQRPIPSAFCFLSHDHGRTWARGHFVAQDTLECQVAEVETGEQRVVTLNARSHLRARVQAQS
TNDGLDFQESQLVKKLVEPPPQGCQGSVISFPSPRSGPGSPAQWLLYTHPTHSWQRADLGAY
LNPRPPAPEAWSEPVLLAKGSAAYSDLQSMGTGPDGSPLFGCLYEANDYEEIVFLMFTLKQA
FPAEYLPQEPKSSDKTHTCPPCPAPELLGGPSVFLFPPKPKDTLMISRTPEVTCVVVDVSHE
DPEVKFNWYVDGVEVHNAKTKPREEQYNSTYRVVSVLTVLHQDWLNGKEYKCKVSNKALPAP
IEKTISKAKGQPREPQVYTLPPSREEMTKNQVSLTCLVKGFYPSDIAVEWESNGQPENNYKT
TPPVLDSDGSFFLTSKLTVDKSRWQQGNVFSCSVMHEALHNHYTQKSLSLSPGK
SEQ ID NO: 106:
DASLPYLQKESVFQSGAHAYRIPALLYLPGQQSLLAFAEQRASKKDEHAELIVLRRGDYDAG
THQVQWQAQEVVAQARLDGHRSMNPCPLYDEQTGTLFLFFIAIPGQVTEQQQLQTRANVTRL
CQVTSTDHGRTWSSPRDLTDAAIGPAYREWSTFAVGPGHCLQLHDRARSLVVPAYAYRKLHP
KQRPIPSAFCFLSHDHGRTWARGHFVAQDTLECQVAEVETGEQRVVTLNARSHLRARVQAQS
TNDGLDFQESQLVKKLVEPPPQGCQGSVISFPSPRSGPGSPAQWLLYTHPTHSWQRADLGAY
LNPRPPAPEAWSEPVLLAKGSAAYSDLQSMGTGPDGSPLFGCLYEANDYEEIVFLMFTLKQA
FPAEYLPQEPKSSDKTHTCPPCPAPELLGGPSVFLFPPKPKDTLMISRTPEVTCVVVDVSHE
DPEVKFNWYVDGVEVHNAKTKPREEQYNSTYRVVSVLTVLHQDWLNGKEYKCKVSNKALPAP
IEKTISKAKGQPREPQVYTLPPSREEMTKNQVSLTCLVKGFYPSDIAVEWESNGQPENNYKT
TPPVLDSDGSFFLTSKLTVDKSRWQQGNVFSCSVMHEALHNHYTQKSLSLSPGK
SEQ ID NO: 107:
DASLPYLQDESVFQSGAHAYRIPALLYLPGQQSLLAFAEQRASKKDEHAELIVLRRGDYDAP
THQVQWQAQEVVAQARLDGHRSMNPCPLYDEQTGTLFLFFIAIPGQVTEQQQLQTRANVTRL
CQVTSTDHGRTWSSPRDLTDAAIGPAYREWSTFAVGPGHCLQLHDRARSLVVPAYAYRKLHP
KQRPIPSAFCFLSHDHGRTWARGHFVAQDTLECQVAEVETGEQRVVTLNARSHLRARVQAQS
TNDGLDFQESQLVKKLVEPPPQGCQGSVISFPSPRSGPGSPAQWLLYTHPTHSWQRADLGAY
LNPRPPAPEAWSEPVLLAKGSAAYSDLQSMGTGPDGSPLFGCLYEANDYEEIRFIMFTLKQA
FPAEYLPQEPKSSDKTHTCPPCPAPELLGGPSVFLFPPKPKDTLMISRTPEVTCVVVDVSHE
DPEVKFNWYVDGVEVHNAKTKPREEQYNSTYRVVSVLTVLHQDWLNGKEYKCKVSNKALPAP
IEKTISKAKGQPREPQVYTLPPSREEMTKNQVSLTCLVKGFYPSDIAVEWESNGQPENNYKT
TPPVLDSDGSFFLTSKLTVDKSRWQQGNVFSCSVMHEALHNHYTQKSLSLSPGK
SEQ ID NO: 108:
DASLPYLQKESVFQSGAHAYRIPALLYLPGQQSLLAFAEQRASKKDEHAELIVLRRGDYDAN
THQVQWQAQEVVAQARLDGHRSMNPCPLYDAQTGTLFLFFIAIPGQVTEQQQLQTRANVTRL
CQVTSTDHGRTWSSPRDLTDAAIGPAYREWSTFAVGPGHCLQLHDRARSLVVPAYAYRKLHP
KQRPIPSAFCFLSHDHGRTWARGHFVAQDTLECQVAEVETGEQRVVTLNARSHLRARVQAQS
TNDGLDFQESQLVKKLVEPPPQGCQGSVISFPSPRSGPGSPAQWLLYTHPTHSWQRADLGAY
LNPRPPAPEAWSEPVLLAKGSAAYSDLQSMGTGPDGSPLFGCLYEANDYEEIVFLMFTLKQA
FPAEYLPQEPKSSDKTHTCPPCPAPELLGGPSVFLFPPKPKDTLMISRTPEVTCVVVDVSHE
DPEVKFNWYVDGVEVHNAKTKPREEQYNSTYRVVSVLTVLHQDWLNGKEYKCKVSNKALPAP
IEKTISKAKGQPREPQVYTLPPSREEMTKNQVSLTCLVKGFYPSDIAVEWESNGQPENNYKT
TPPVLDSDGSFFLTSKLTVDKSRWQQGNVFSCSVMHEALHNHYTQKSLSLSPGK
SEQ ID NO: 109:
DASLPYLQKESVFQSGAHAYRIPALLYLPGQQSLLAFAEQRASKKDEHAELIVLRRGDYDAP
THQVQWQAQEVVAQARLDGHRSMNPCPLYDAQTGTLFLFFIAIPGQVTEQQQLQTRANVTRL
CQVTSTDHGRTWSSPRDLTDAAIGPAYREWSTFAVGPGHCLQLHDRARSLVVPAYAYRKLHP
KQRPIPSAFCFLSHDHGRTWARGHFVAQDTLECQVAEVETGEQRVVTLNARSHLRARVQAQS
TNDGLDFQESQLVKKLVEPPPAGCQGSVISFPSPRSGPGSPAQWLLYTHPTHRKQRADLGAY
LNPRPPAPEAWSEPVLLAKGSAAYSDLQSMGTGPDGSPLFGCLYEANDYEEIVFLMFTLKQA
FPAEYLPQEPKSSDKTHTCPPCPAPELLGGPSVFLFPPKPKDTLMISRTPEVTCVVVDVSHE
DPEVKFNWYVDGVEVHNAKTKPREEQYNSTYRVVSVLTVLHQDWLNGKEYKCKVSNKALPAP
IEKTISKAKGQPREPQVYTLPPSREEMTKNQVSLTCLVKGFYPSDIAVEWESNGQPENNYKT
TPPVLDSDGSFFLTSKLTVDKSRWQQGNVFSCSVMHEALHNHYTQKSLSLSPGK
SEQ ID NO: 110:
DASLPYLQKESVFQSGAHAYRIPALLYLPGQQSLLAFAEQRASKKDEHAELIVLRRGDYDAS
THQVQWQAQEVVAQARLDGHRSMNPCPLYDAQTGTLFLFFIAIPGQVTEQQQLQTRANVTRL
CQVTSTDHGRTWSSPRDLTDAAIGPAYREWSTFAVGPGHCLQLHDRARSLVVPAYAYRKLHP
KQRPIPSAFCFLSHDHGRTWARGHFVAQDTLECQVAEVETGEQRVVTLNARSHLRARVQAQS
TNDGLDFQESQLVKKLVEPPPAGCQGSVISFPSPRSGPGSPAQWLLYTHPTHRKQRADLGAY
LNPRPPAPEAWSEPVLLAKGSAAYSDLQSMGTGPDGSPLFGCLYEANDYEEIVFLMFTLKQA
FPAEYLPQEPKSSDKTHTCPPCPAPELLGGPSVFLFPPKPKDTLMISRTPEVTCVVVDVSHE
DPEVKFNWYVDGVEVHNAKTKPREEQYNSTYRVVSVLTVLHQDWLNGKEYKCKVSNKALPAP
IEKTISKAKGQPREPQVYTLPPSREEMTKNQVSLTCLVKGFYPSDIAVEWESNGQPENNYKT
TPPVLDSDGSFFLTSKLTVDKSRWQQGNVFSCSVMHEALHNHYTQKSLSLSPGK
SEQ ID NO: 111:
DASLPYLQKESVFQSGAHAYRIPALLYLPGQQSLLAFAEQRASKKDEHAELIVLRRGDYDAT
THQVQWQAQEVVAQARLDGHRSMNPCPLYDAQTGTLFLFFIAIPGQVTEQQQLQTRANVTRL
CQVTSTDHGRTWSSPRDLTDAAIGPAYREWSTFAVGPGHCLQLHDRARSLVVPAYAYRKLHP
KQRPIPSAFCFLSHDHGRTWARGHFVAQDTLECQVAEVETGEQRVVTLNARSHLRARVQAQS
TNDGLDFQESQLVKKLVEPPPAGCQGSVISFPSPRSGPGSPAQWLLYTHPTHRKQRADLGAY
LNPRPPAPEAWSEPVLLAKGSAAYSDLQSMGTGPDGSPLFGCLYEANDYEEIVFLMFTLKQA
FPAEYLPQEPKSSDKTHTCPPCPAPELLGGPSVFLFPPKPKDTLMISRTPEVTCVVVDVSHE
DPEVKFNWYVDGVEVHNAKTKPREEQYNSTYRVVSVLTVLHQDWLNGKEYKCKVSNKALPAP
IEKTISKAKGQPREPQVYTLPPSREEMTKNQVSLTCLVKGFYPSDIAVEWESNGQPENNYKT
TPPVLDSDGSFFLTSKLTVDKSRWQQGNVFSCSVMHEALHNHYTQKSLSLSPGK
SEQ ID NO: 112:
DASLPYLQKESVFQSGAHAYRIPALLYLPGQQSLLAFAEQRASKKDEHAELIVLRRGDYDAN
THQVQWQAQEVVAQARLDGHRSMNPCPLYDAQTGTLFLFFIAIPGQVTEQQQLQTRANVTRL
CQVTSTDHGRTWSSPRDLTDAAIGPAYREWSTFAVGPGHCLQLHDRARSLVVPAYAYRKLHP
KQRPIPSAFCFLSHDHGRTWARGHFVAQDTLECQVAEVETGEQRVVTLNARSHLRARVQAQS
TNDGLDFQESQLVKKLVEPPPAGCQGSVISFPSPRSGPGSPAQWLLYTHPTHRKQRADLGAY
LNPRPPAPEAWSEPVLLAKGSAAYSDLQSMGTGPDGSPLFGCLYEANDYEEIVFLMFTLKQA
FPAEYLPQEPKSSDKTHTCPPCPAPELLGGPSVFLFPPKPKDTLMISRTPEVTCVVVDVSHE
DPEVKFNWYVDGVEVHNAKTKPREEQYNSTYRVVSVLTVLHQDWLNGKEYKCKVSNKALPAP
IEKTISKAKGQPREPQVYTLPPSREEMTKNQVSLTCLVKGFYPSDIAVEWESNGQPENNYKT
TPPVLDSDGSFFLTSKLTVDKSRWQQGNVFSCSVMHEALHNHYTQKSLSLSPGK
SEQ ID NO: 113:
ASLPYLQKESVFQSGAHAYRIPALLYLPGQQSLLAFAEQRASKKDEHAELIVLRRGDYDAPT
HQVQWQAQEVVAQARLDGHRSMNPCPLYDAQTGTLFLFFIAIPGQVTEQQQLQTRANVTRLC
QVTSTDHGRTWSSPRDLTDAAIGPAYREWSTFAVGPGHCLQLHDRARSLVVPAYAYRKLHPK
QRPIPSAFCFLSHDHGRTWARGHFVAQDTLECQVAEVETGEQRVVTLNARSHLRARVQAQST
NDGLDFQESQLVKKLVEPPPQGCQGSVISFPSPRSGPGSPAQWLLYTHPTHSWQRADLGAYL
NPRPPAPEAWSEPVLLAKGSCAYSDLQSMGTGPDGSPLFGCLYEANDYEEIVFLMFTLKQAF
PAEYLPQGGGGSGGGGSDKTHTCPPCPAPELLGGPSVFLFPPKPKDTLMISRTPEVTCVVVD
VSHEDPEVKFNWYVDGVEVHNAKTKPREEQYNSTYRVVSVLTVLHQDWLNGKEYKCKVSNKA
LPAPIEKTISKAKGQPREPQVYTLPPSREEMTKNQVSLTCLVKGFYPSDIAVEWESNGQPEN
NYKTTPPVLDSDGSFFLYSKLTVDKSRWQQGNVFSCSVMHEALHNHYTQKSLSLSPGK
SEQ ID NO: 114:
ASLPYLQKESVFQSGAHAYRIPALLYLPGQQSLLAFAEQRASKKDEHAELIVLRRGDYDAPT
HQVQWQAQEVVAQARLDGHRSMNPCPLYDAQTGTLFLFFIAIPGQVTEQQQLQTRANVTRLC
QVTSTDHGRTWSSPRDLTDAAIGPAYREWSTFAVGPGHCLQLHDRARSLVVPAYAYRKLHPK
QRPIPSAFCFLSHDHGRTWARGHFVAQDTLECQVAEVETGEQRVVTLNARSHLRARVQAQST
NDGLDFQESQLVKKLVEPPPQGCQGSVISFPSPRSGPGSPAQWLLYTHPTHSWQRADLGAYL
NPRPPAPEAWSEPVLLAKGSAAYSDLQSMGTGPDGSPLFGCLYEANDYEEIVFLMFTLKQAF
PAEYLPQGGGGSGGGGSDKTHTCPPCPAPELLGGPSVFLFPPKPKDTLMISRTPEVTCVVVD
VSHEDPEVKFNWYVDGVEVHNAKTKPREEQYNSTYRVVSVLTVLHQDWLNGKEYKCKVSNKA
LPAPIEKTISKAKGQPREPQVYTLPPSREEMTKNQVSLTCLVKGFYPSDIAVEWESNGQPEN
NYKTTPPVLDSDGSFFLYSKLTVDKSRWQQGNVFSCSVMHEALHNHYTQKSLSLSPGK
SEQ ID NO: 115:
AASLPYLQKESVFQSGAHAYRIPALLYLPGQQSLLAFAEQRASKKDEHAELIVLRRGDYDAP
THQVQWQAQEVVAQARLDGHRSMNPCPLYDAQTGTLFLFFIAIPGQVTEQQQLQTRANVTRL
CQVTSTDHGRTWSSPRDLTDAAIGPAYREWSTFAVGPGHCLQLHDRARSLVVPAYAYRKLHP
KQRPIPSAFCFLSHDHGRTWARGHFVAQDTLECQVAEVETGEQRVVTLNARSHLRARVQAQS
TNDGLDFQESQLVKKLVEPPPQGCQGSVISFPSPRSGPGSPAQWLLYTHPTHSWQRADLGAY
LNPRPPAPEAWSEPVLLAKGSAAYSDLQSMGTGPDGSPLFGCLYEANDYEEIVFLMFTLKQA
FPAEYLPQGGGGSGGGGSDKTHTCPPCPAPELLGGPSVFLFPPKPKDTLMISRTPEVTCVVV
DVSHEDPEVKENWYVDGVEVHNAKTKPREEQYNSTYRVVSVLTVLHQDWLNGKEYKCKVSNK
ALPAPIEKTISKAKGQPREPQVYTLPPSREEMTKNQVSLTCLVKGFYPSDIAVEWESNGQPE
NNYKTTPPVLDSDGSFFLYSKLTVDKSRWQQGNVFSCSVMHEALHNHYTQKSLSLSPGK
SEQ ID NO: 116:
DASLPYLQKESVFQSGAHAYRIPALLYLPGQQSLLAFAEQRASKKDEHAELIVLRRGDYDAP
THQVQWQAQEVVAQARLDGHRSMNPCPLYDAQTGTLFLFFIAIPGQVTEQQQLQTRANVTRL
CQVTSTDHGRTWSSPRDLTDAAIGPAYREWSTFAVGPGHCLQLHDRARSLVVPAYAYRKLHP
KQRPIPSAFCFLSHDHGRTWARGHFVAQDTLECQVAEVETGEQRVVTLNARSHLRARVQAQS
TNDGLDFQESQLVKKLVEPPPQGCQGSVISFPSPRSGPGSPAQWLLYTHPTHSWQRADLGAY
LNPRPPAPEAWSEPVLLAKGSAAYSDLQSMGTGPDGSPLFGCLYEANDYEEIVFLMFTLKQA
FPAEYLPQGGGGSGGGGSDKTHTCPPCPAPELLGGPSVFLFPPKPKDTLMISRTPEVTCVVV
DVSHEDPEVKFNWYVDGVEVHNAKTKPREEQYNSTYRVVSVLTVLHQDWLNGKEYKCKVSNK
ALPAPIEKTISKAKGQPREPQVYTLPPSREEMTKNQVSLTCLVKGFYPSDIAVEWESNGQPE
NNYKTTPPVLDSDGSFFLYSKLTVDKSRWQQGNVFSCSVMHEALHNHYTQKSLSLSPGK
SEQ ID NO: 117:
AASLPYLQKESVFQSGAHAYRIPALLYLPGQQSLLAFAEQRASKKDEHAELIVLRRGDYDAP
THQVQWQAQEVVAQARLDGHRSMNPCPLYDAQTGTLFLFFIAIPGQVTEQQQLQTRANVTRL
CQVTSTDHGRTWSSPRDLTDAAIGPAYREWSTFAVGPGHCLQLHDRARSLVVPAYAYRKLHP
KQRPIPSAFCFLSHDHGRTWARGHFVAQDTLECQVAEVETGEQRVVTLNARSHLRARVQAQS
TNDGLDFQESQLVKKLVEPPPQGCQGSVISFPSPRSGPGSPAQWLLYTHPTHSWQRADLGAY
LNPRPPAPEAWSEPVLLAKGSCAYSDLQSMGTGPDGSPLFGCLYEANDYEEIVFLMFTLKQA
FPAEYLPQGGGGSGGGGSDKTHTCPPCPAPELLGGPSVFLFPPKPKDTLMISRTPEVTCVVV
DVSHEDPEVKFNWYVDGVEVHNAKTKPREEQYNSTYRVVSVLTVLHQDWLNGKEYKCKVSNK
ALPAPIEKTISKAKGQPREPQVYTLPPSREEMTKNQVSLTCLVKGFYPSDIAVEWESNGQPE
NNYKTTPPVLDSDGSFFLYSKLTVDKSRWQQGNVFSCSVMHEALHNHYTQKSLSLSPGK
SEQ ID NO: 118:
DASLPYLQKESVFQSGAHAYRIPALLYLPGQQSLLAFAEQRASKKDEHAELIVLRRGDYDAP
THQVQWQAQEVVAQARLDGHRSMNPCPLYDAQTGTLFLFFIAIPGQVTEQQQLQTRANVTRL
CQVTSTDHGRTWSSPRDLTDAAIGPAYREWSTFAVGPGHCLQLHDRARSLVVPAYAYRKLHP
KQRPIPSAFCFLSHDHGRTWARGHFVAQDTLECQVAEVETGEQRVVTLNARSHLRARVQAQS
TNDGLDFQESQLVKKLVEPPPQGCQGSVISFPSPRSGPGSPAQWLLYTHPTHSWQRADLGAY
LNPRPPAPEAWSEPVLLAKGSCAYSDLQSMGTGPDGSPLFGCLYEANDYEEIVFLMFTLKQA
FPAEYLPQGGGGSGGGGSDKTHTCPPCPAPELLGGPSVFLFPPKPKDTLMISRTPEVTCVVV
DVSHEDPEVKFNWYVDGVEVHNAKTKPREEQYNSTYRVVSVLTVLHQDWLNGKEYKCKVSNK
ALPAPIEKTISKAKGQPREPQVYTLPPSREEMTKNQVSLTCLVKGFYPSDIAVEWESNGQPE
NNYKTTPPVLDSDGSFFLYSKLTVDKSRWQQGNVFSCSVMHEALHNHYTQKSLSLSPGK
SEQ ID NO: 119:
MASLPYLQKESVFQSGAHAYRIPALLYLPGQQSLLAFAEQRASKKDEHAELIVLRRGDYDAP
THQVQWQAQEVVAQARLDGHRSMNPCPLYDAQTGTLFLFFIAIPGQVTEQQQLQTRANVTRL
CQVTSTDHGRTWSSPRDLTDAAIGPAYREWSTFAVGPGHCLQLHDRARSLVVPAYAYRKLHP
KQRPIPSAFCFLSHDHGRTWARGHFVAQDTLECQVAEVETGEQRVVTLNARSHLRARVQAQS
TNDGLDFQESQLVKKLVEPPPQGCQGSVISFPSPRSGPGSPAQWLLYTHPTHSWQRADLGAY
LNPRPPAPEAWSEPVLLAKGSCAYSDLQSMGTGPDGSPLFGCLYEANDYEEIVFLMETLKQA
FPAEYLPQGGGGSGGGGSDKTHTCPPCPAPELLGGPSVFLFPPKPKDTLMISRTPEVTCVVV
DVSHEDPEVKFNWYVDGVEVHNAKTKPREEQYNSTYRVVSVLTVLHQDWLNGKEYKCKVSNK
ALPAPIEKTISKAKGQPREPQVYTLPPSREEMTKNQVSLTCLVKGFYPSDIAVEWESNGQPE
NNYKTTPPVLDSDGSFFLYSKLTVDKSRWQQGNVFSCSVMHEALHNHYTQKSLSLSPGK
SEQ ID NO: 120:
MASLPYLQKESVFQSGAHAYRIPALLYLPGQQSLLAFAEQRASKKDEHAELIVLRRGDYDAP
THQVQWQAQEVVAQARLDGHRSMNPCPLYDAQTGTLFLFFIAIPGQVTEQQQLQTRANVTRL
CQVTSTDHGRTWSSPRDLTDAAIGPAYREWSTFAVGPGHCLQLHDRARSLVVPAYAYRKLHP
KQRPIPSAFCFLSHDHGRTWARGHFVAQDTLECQVAEVETGEQRVVTLNARSHLRARVQAQS
TNDGLDFQESQLVKKLVEPPPQGCQGSVISFPSPRSGPGSPAQWLLYTHPTHSWQRADLGAY
LNPRPPAPEAWSEPVLLAKGSAAYSDLQSMGTGPDGSPLFGCLYEANDYEEIVFLMFTLKQA
FPAEYLPQGGGGSGGGGSDKTHTCPPCPAPELLGGPSVFLFPPKPKDTLMISRTPEVTCVVV
DVSHEDPEVKFNWYVDGVEVHNAKTKPREEQYNSTYRVVSVLTVLHQDWLNGKEYKCKVSNK
ALPAPIEKTISKAKGQPREPQVYTLPPSREEMTKNQVSLTCLVKGFYPSDIAVEWESNGQPE
NNYKTTPPVLDSDGSFFLYSKLTVDKSRWQQGNVFSCSVMHEALHNHYTQKSLSLSPGK
SEQ ID NO: 121:
DASLPYLQKESVFQSGAHAYRIPALLYLPGQQSLLAFAEQRASKKDEHAELIVLRRGDYDAG
THQVQWQAQEVVAQARLDGHRSMNPCPLYDEQTGTLFLFFIAIPGQVTEQQQLQTRANVTRL
CQVTSTDHGRTWSSPRDLTDAAIGPAYREWSTFAVGPGHCLQLHDRARSLVVPAYAYRKLHP
KQRPIPSAFCFLSHDHGRTWARGHFVAQDTLECQVAEVETGEQRVVTLNARSHLRARVQAQS
TNDGLDFQESQLVKKLVEPPPQGCQGSVISFPSPRSGPGSPAQWLLYTHPTHSWQRADLGAY
LNPRPPAPEAWSEPVLLAKGSAAYSDLQSMGTGPDGSPLFGCLYEANDYEEIVFLMFTLKQA
FPAEYLPQGGGGSGGGGSDKTHTCPPCPAPELLGGPSVFLFPPKPKDTLMISRTPEVTCVVV
DVSHEDPEVKFNWYVDGVEVHNAKTKPREEQYNSTYRVVSVLTVLHQDWLNGKEYKCKVSNK
ALPAPIEKTISKAKGQPREPQVYTLPPSREEMTKNQVSLTCLVKGFYPSDIAVEWESNGQPE
NNYKTTPPVLDSDGSFFLYSKLTVDKSRWQQGNVFSCSVMHEALHNHYTQKSLSLSPGK
SEQ ID NO: 122:
DASLPYLQDESVFQSGAHAYRIPALLYLPGQQSLLAFAEQRASKKDEHAELIVLRRGDYDAP
THQVQWQAQEVVAQARLDGHRSMNPCPLYDEQTGTLFLFFIAIPGQVTEQQQLQTRANVTRL
CQVTSTDHGRTWSSPRDLTDAAIGPAYREWSTFAVGPGHCLQLHDRARSLVVPAYAYRKLHP
KQRPIPSAFCFLSHDHGRTWARGHFVAQDTLECQVAEVETGEQRVVTLNARSHLRARVQAQS
TNDGLDFQESQLVKKLVEPPPQGCQGSVISFPSPRSGPGSPAQWLLYTHPTHSWQRADLGAY
LNPRPPAPEAWSEPVLLAKGSAAYSDLQSMGTGPDGSPLFGCLYEANDYEEIRFIMFTLKQA
FPAEYLPQGGGGSGGGGSDKTHTCPPCPAPELLGGPSVFLFPPKPKDTLMISRTPEVTCVVV
DVSHEDPEVKFNWYVDGVEVHNAKTKPREEQYNSTYRVVSVLTVLHQDWLNGKEYKCKVSNK
ALPAPIEKTISKAKGQPREPQVYTLPPSREEMTKNQVSLTCLVKGFYPSDIAVEWESNGQPE
NNYKTTPPVLDSDGSFFLYSKLTVDKSRWQQGNVFSCSVMHEALHNHYTQKSLSLSPGK
SEQ ID NO: 123:
DASLPYLQKESVFQSGAHAYRIPALLYLPGQQSLLAFAEQRASKKDEHAELIVLRRGDYDAN
THQVQWQAQEVVAQARLDGHRSMNPCPLYDAQTGTLFLFFIAIPGQVTEQQQLQTRANVTRL
CQVTSTDHGRTWSSPRDLTDAAIGPAYREWSTFAVGPGHCLQLHDRARSLVVPAYAYRKLHP
KQRPIPSAFCFLSHDHGRTWARGHFVAQDTLECQVAEVETGEQRVVTLNARSHLRARVQAQS
TNDGLDFQESQLVKKLVEPPPQGCQGSVISFPSPRSGPGSPAQWLLYTHPTHSWQRADLGAY
LNPRPPAPEAWSEPVLLAKGSAAYSDLQSMGTGPDGSPLFGCLYEANDYEEIVFLMFTLKQA
FPAEYLPQGGGGSGGGGSDKTHTCPPCPAPELLGGPSVFLFPPKPKDTLMISRTPEVTCVVV
DVSHEDPEVKFNWYVDGVEVHNAKTKPREEQYNSTYRVVSVLTVLHQDWLNGKEYKCKVSNK
ALPAPIEKTISKAKGQPREPQVYTLPPSREEMTKNQVSLTCLVKGFYPSDIAVEWESNGQPE
NNYKTTPPVLDSDGSFFLYSKLTVDKSRWQQGNVFSCSVMHEALHNHYTQKSLSLSPGK
SEQ ID NO: 124:
DASLPYLQKESVFQSGAHAYRIPALLYLPGQQSLLAFAEQRASKKDEHAELIVLRRGDYDAP
THQVQWQAQEVVAQARLDGHRSMNPCPLYDAQTGTLFLFFIAIPGQVTEQQQLQTRANVTRL
CQVTSTDHGRTWSSPRDLTDAAIGPAYREWSTFAVGPGHCLQLHDRARSLVVPAYAYRKLHP
KQRPIPSAFCFLSHDHGRTWARGHFVAQDTLECQVAEVETGEQRVVTLNARSHLRARVQAQS
TNDGLDFQESQLVKKLVEPPPAGCQGSVISFPSPRSGPGSPAQWLLYTHPTHRKQRADLGAY
LNPRPPAPEAWSEPVLLAKGSAAYSDLQSMGTGPDGSPLFGCLYEANDYEEIVFLMFTLKQA
FPAEYLPQGGGGSGGGGSDKTHTCPPCPAPELLGGPSVFLFPPKPKDTLMISRTPEVTCVVV
DVSHEDPEVKFNWYVDGVEVHNAKTKPREEQYNSTYRVVSVLTVLHQDWLNGKEYKCKVSNK
ALPAPIEKTISKAKGQPREPQVYTLPPSREEMTKNQVSLTCLVKGFYPSDIAVEWESNGQPE
NNYKTTPPVLDSDGSFFLYSKLTVDKSRWQQGNVFSCSVMHEALHNHYTQKSLSLSPGK
SEQ ID NO: 125:
DASLPYLQKESVFQSGAHAYRIPALLYLPGQQSLLAFAEQRASKKDEHAELIVLRRGDYDAS
THQVQWQAQEVVAQARLDGHRSMNPCPLYDAQTGTLFLFFIAIPGQVTEQQQLQTRANVTRL
CQVTSTDHGRTWSSPRDLTDAAIGPAYREWSTFAVGPGHCLQLHDRARSLVVPAYAYRKLHP
KQRPIPSAFCFLSHDHGRTWARGHFVAQDTLECQVAEVETGEQRVVTLNARSHLRARVQAQS
TNDGLDFQESQLVKKLVEPPPAGCQGSVISFPSPRSGPGSPAQWLLYTHPTHRKQRADLGAY
LNPRPPAPEAWSEPVLLAKGSAAYSDLQSMGTGPDGSPLFGCLYEANDYEEIVFLMFTLKQA
FPAEYLPQGGGGSGGGGSDKTHTCPPCPAPELLGGPSVFLFPPKPKDTLMISRTPEVTCVVV
DVSHEDPEVKFNWYVDGVEVHNAKTKPREEQYNSTYRVVSVLTVLHQDWLNGKEYKCKVSNK
ALPAPIEKTISKAKGQPREPQVYTLPPSREEMTKNQVSLTCLVKGFYPSDIAVEWESNGQPE
NNYKTTPPVLDSDGSFFLYSKLTVDKSRWQQGNVFSCSVMHEALHNHYTQKSLSLSPGK
SEQ ID NO: 126:
DASLPYLQKESVFQSGAHAYRIPALLYLPGQQSLLAFAEQRASKKDEHAELIVLRRGDYDAT
THQVQWQAQEVVAQARLDGHRSMNPCPLYDAQTGTLFLFFIAIPGQVTEQQQLQTRANVTRL
CQVTSTDHGRTWSSPRDLTDAAIGPAYREWSTFAVGPGHCLQLHDRARSLVVPAYAYRKLHP
KQRPIPSAFCFLSHDHGRTWARGHFVAQDTLECQVAEVETGEQRVVTLNARSHLRARVQAQS
TNDGLDFQESQLVKKLVEPPPAGCQGSVISFPSPRSGPGSPAQWLLYTHPTHRKQRADLGAY
LNPRPPAPEAWSEPVLLAKGSAAYSDLQSMGTGPDGSPLFGCLYEANDYEEIVFLMFTLKQA
FPAEYLPQGGGGSGGGGSDKTHTCPPCPAPELLGGPSVFLFPPKPKDTLMISRTPEVTCVVV
DVSHEDPEVKFNWYVDGVEVHNAKTKPREEQYNSTYRVVSVLTVLHQDWLNGKEYKCKVSNK
ALPAPIEKTISKAKGQPREPQVYTLPPSREEMTKNQVSLTCLVKGFYPSDIAVEWESNGQPE
NNYKTTPPVLDSDGSFFLYSKLTVDKSRWQQGNVFSCSVMHEALHNHYTQKSLSLSPGK
SEQ ID NO: 127:
DASLPYLQKESVFQSGAHAYRIPALLYLPGQQSLLAFAEQRASKKDEHAELIVLRRGDYDAN
THQVQWQAQEVVAQARLDGHRSMNPCPLYDAQTGTLFLFFIAIPGQVTEQQQLQTRANVTRL
CQVTSTDHGRTWSSPRDLTDAAIGPAYREWSTFAVGPGHCLQLHDRARSLVVPAYAYRKLHP
KQRPIPSAFCFLSHDHGRTWARGHFVAQDTLECQVAEVETGEQRVVTLNARSHLRARVQAQS
TNDGLDFQESQLVKKLVEPPPAGCQGSVISFPSPRSGPGSPAQWLLYTHPTHRKQRADLGAY
LNPRPPAPEAWSEPVLLAKGSAAYSDLQSMGTGPDGSPLFGCLYEANDYEEIVFLMFTLKQA
FPAEYLPQGGGGSGGGGSDKTHTCPPCPAPELLGGPSVFLFPPKPKDTLMISRTPEVTCVVV
DVSHEDPEVKFNWYVDGVEVHNAKTKPREEQYNSTYRVVSVLTVLHQDWLNGKEYKCKVSNK
ALPAPIEKTISKAKGQPREPQVYTLPPSREEMTKNQVSLTCLVKGFYPSDIAVEWESNGQPE
NNYKTTPPVLDSDGSFFLYSKLTVDKSRWQQGNVFSCSVMHEALHNHYTQKSLSLSPGK
SEQ ID NO: 128:
ASLPYLQKESVFQSGAHAYRIPALLYLPGQQSLLAFAEQRASKKDEHAELIVLRRGDYDAPT
HQVQWQAQEVVAQARLDGHRSMNPCPLYDAQTGTLFLFFIAIPGQVTEQQQLQTRANVTRLC
QVTSTDHGRTWSSPRDLTDAAIGPAYREWSTFAVGPGHCLQLHDRARSLVVPAYAYRKLHPK
QRPIPSAFCFLSHDHGRTWARGHFVAQDTLECQVAEVETGEQRVVTLNARSHLRARVQAQST
NDGLDFQESQLVKKLVEPPPQGCQGSVISFPSPRSGPGSPAQWLLYTHPTHSWQRADLGAYL
NPRPPAPEAWSEPVLLAKGSCAYSDLQSMGTGPDGSPLFGCLYEANDYEEIVFLMFTLKQAF
PAEYLPQEPKSSDKTHTCPPCPAPELLGGPSVFLFPPKPKDTLMISRTPEVTCVVVDVSHED
PEVKFNWYVDGVEVHNAKTKPREEQYNSTYRVVSVLTVLHQDWLNGKEYKCKVSNKALPAPI
EKTISKAKGQPREPQVYTLPPSREEMTKNQVSLTCLVKGFYPSDIAVEWESNGQPENNYKTT
PPVLDSDGSFFLYSKLTVDKSRWQQGNVFSCSVMHEALHNHYTQKSLSLSPGK
SEQ ID NO: 129:
ASLPYLQKESVFQSGAHAYRIPALLYLPGQQSLLAFAEQRASKKDEHAELIVLRRGDYDAPT
HQVQWQAQEVVAQARLDGHRSMNPCPLYDAQTGTLFLFFIAIPGQVTEQQQLQTRANVTRLC
QVTSTDHGRTWSSPRDLTDAAIGPAYREWSTFAVGPGHCLQLHDRARSLVVPAYAYRKLHPK
QRPIPSAFCFLSHDHGRTWARGHFVAQDTLECQVAEVETGEQRVVTLNARSHLRARVQAQST
NDGLDFQESQLVKKLVEPPPQGCQGSVISFPSPRSGPGSPAQWLLYTHPTHSWQRADLGAYL
NPRPPAPEAWSEPVLLAKGSAAYSDLQSMGTGPDGSPLFGCLYEANDYEEIVFLMFTLKQAF
PAEYLPQEPKSSDKTHTCPPCPAPELLGGPSVFLFPPKPKDTLMISRTPEVTCVVVDVSHED
PEVKFNWYVDGVEVHNAKTKPREEQYNSTYRVVSVLTVLHQDWLNGKEYKCKVSNKALPAPI
EKTISKAKGQPREPQVYTLPPSREEMTKNQVSLTCLVKGFYPSDIAVEWESNGQPENNYKTT
PPVLDSDGSFFLYSKLTVDKSRWQQGNVFSCSVMHEALHNHYTQKSLSLSPGK
SEQ ID NO: 130:
AASLPYLQKESVFQSGAHAYRIPALLYLPGQQSLLAFAEQRASKKDEHAELIVLRRGDYDAP
THQVQWQAQEVVAQARLDGHRSMNPCPLYDAQTGTLFLFFIAIPGQVTEQQQLQTRANVTRL
CQVTSTDHGRTWSSPRDLTDAAIGPAYREWSTFAVGPGHCLQLHDRARSLVVPAYAYRKLHP
KQRPIPSAFCFLSHDHGRTWARGHFVAQDTLECQVAEVETGEQRVVTLNARSHLRARVQAQS
TNDGLDFQESQLVKKLVEPPPQGCQGSVISFPSPRSGPGSPAQWLLYTHPTHSWQRADLGAY
LNPRPPAPEAWSEPVLLAKGSAAYSDLQSMGTGPDGSPLFGCLYEANDYEEIVFLMFTLKQA
FPAEYLPQEPKSSDKTHTCPPCPAPELLGGPSVFLFPPKPKDTLMISRTPEVTCVVVDVSHE
DPEVKFNWYVDGVEVHNAKTKPREEQYNSTYRVVSVLTVLHQDWLNGKEYKCKVSNKALPAP
IEKTISKAKGQPREPQVYTLPPSREEMTKNQVSLTCLVKGFYPSDIAVEWESNGQPENNYKT
TPPVLDSDGSFFLYSKLTVDKSRWQQGNVFSCSVMHEALHNHYTOKSLSLSPGK
SEQ ID NO: 131:
DASLPYLQKESVFQSGAHAYRIPALLYLPGQQSLLAFAEQRASKKDEHAELIVLRRGDYDAP
THQVQWQAQEVVAQARLDGHRSMNPCPLYDAQTGTLFLFFIAIPGQVTEQQQLQTRANVTRL
CQVTSTDHGRTWSSPRDLTDAAIGPAYREWSTFAVGPGHCLQLHDRARSLVVPAYAYRKLHP
KQRPIPSAFCFLSHDHGRTWARGHFVAQDTLECQVAEVETGEQRVVTLNARSHLRARVQAQS
TNDGLDFQESQLVKKLVEPPPQGCQGSVISFPSPRSGPGSPAQWLLYTHPTHSWQRADLGAY
LNPRPPAPEAWSEPVLLAKGSAAYSDLQSMGTGPDGSPLFGCLYEANDYEEIVFLMFTLKQA
FPAEYLPQEPKSSDKTHTCPPCPAPELLGGPSVFLFPPKPKDTLMISRTPEVTCVVVDVSHE
DPEVKFNWYVDGVEVHNAKTKPREEQYNSTYRVVSVLTVLHQDWLNGKEYKCKVSNKALPAP
IEKTISKAKGQPREPQVYTLPPSREEMTKNQVSLTCLVKGFYPSDIAVEWESNGQPENNYKT
TPPVLDSDGSFFLYSKLTVDKSRWQQGNVFSCSVMHEALHNHYTQKSLSLSPGK
SEQ ID NO: 132:
AASLPYLQKESVFQSGAHAYRIPALLYLPGQQSLLAFAEQRASKKDEHAELIVLRRGDYDAP
THQVQWQAQEVVAQARLDGHRSMNPCPLYDAQTGTLFLFFIAIPGQVTEQQQLQTRANVTRL
CQVTSTDHGRTWSSPRDLTDAAIGPAYREWSTFAVGPGHCLQLHDRARSLVVPAYAYRKLHP
KQRPIPSAFCFLSHDHGRTWARGHFVAQDTLECQVAEVETGEQRVVTLNARSHLRARVQAQS
TNDGLDFQESQLVKKLVEPPPQGCQGSVISFPSPRSGPGSPAQWLLYTHPTHSWQRADLGAY
LNPRPPAPEAWSEPVLLAKGSCAYSDLQSMGTGPDGSPLFGCLYEANDYEEIVFLMFTLKQA
FPAEYLPQEPKSSDKTHTCPPCPAPELLGGPSVFLFPPKPKDTLMISRTPEVTCVVVDVSHE
DPEVKFNWYVDGVEVHNAKTKPREEQYNSTYRVVSVLTVLHQDWLNGKEYKCKVSNKALPAP
IEKTISKAKGQPREPQVYTLPPSREEMTKNQVSLTCLVKGFYPSDIAVEWESNGQPENNYKT
TPPVLDSDGSFFLYSKLTVDKSRWQQGNVFSCSVMHEALHNHYTQKSLSLSPGK
SEQ ID NO: 133:
DASLPYLQKESVFQSGAHAYRIPALLYLPGQQSLLAFAEQRASKKDEHAELIVLRRGDYDAP
THQVQWQAQEVVAQARLDGHRSMNPCPLYDAQTGTLFLFFIAIPGQVTEQQQLQTRANVTRL
CQVTSTDHGRTWSSPRDLTDAAIGPAYREWSTFAVGPGHCLQLHDRARSLVVPAYAYRKLHP
KQRPIPSAFCFLSHDHGRTWARGHFVAQDTLECQVAEVETGEQRVVTLNARSHLRARVQAQS
TNDGLDFQESQLVKKLVEPPPQGCQGSVISFPSPRSGPGSPAQWLLYTHPTHSWQRADLGAY
LNPRPPAPEAWSEPVLLAKGSCAYSDLQSMGTGPDGSPLFGCLYEANDYEEIVFLMFTLKQA
FPAEYLPQEPKSSDKTHTCPPCPAPELLGGPSVFLFPPKPKDTLMISRTPEVTCVVVDVSHE
DPEVKFNWYVDGVEVHNAKTKPREEQYNSTYRVVSVLTVLHQDWLNGKEYKCKVSNKALPAP
IEKTISKAKGQPREPQVYTLPPSREEMTKNQVSLTCLVKGFYPSDIAVEWESNGQPENNYKT
TPPVLDSDGSFFLYSKLTVDKSRWQQGNVFSCSVMHEALHNHYTQKSLSLSPGK
SEQ ID NO: 134:
MASLPYLQKESVFQSGAHAYRIPALLYLPGQQSLLAFAEQRASKKDEHAELIVLRRGDYDAP
THQVQWQAQEVVAQARLDGHRSMNPCPLYDAQTGTLFLFFIAIPGQVTEQQQLQTRANVTRL
CQVTSTDHGRTWSSPRDLTDAAIGPAYREWSTFAVGPGHCLQLHDRARSLVVPAYAYRKLHP
KQRPIPSAFCFLSHDHGRTWARGHFVAQDTLECQVAEVETGEQRVVTLNARSHLRARVQAQS
TNDGLDFQESQLVKKLVEPPPQGCQGSVISFPSPRSGPGSPAQWLLYTHPTHSWQRADLGAY
LNPRPPAPEAWSEPVLLAKGSCAYSDLQSMGTGPDGSPLFGCLYEANDYEEIVFLMFTLKQA
FPAEYLPQEPKSSDKTHTCPPCPAPELLGGPSVFLFPPKPKDTLMISRTPEVTCVVVDVSHE
DPEVKFNWYVDGVEVHNAKTKPREEQYNSTYRVVSVLTVLHQDWLNGKEYKCKVSNKALPAP
IEKTISKAKGQPREPQVYTLPPSREEMTKNQVSLTCLVKGFYPSDIAVEWESNGQPENNYKT
TPPVLDSDGSFFLYSKLTVDKSRWQQGNVFSCSVMHEALHNHYTOKSLSLSPGK
SEQ ID NO: 135:
MASLPYLQKESVFQSGAHAYRIPALLYLPGQQSLLAFAEQRASKKDEHAELIVLRRGDYDAP
THQVQWQAQEVVAQARLDGHRSMNPCPLYDAQTGTLFLFFIAIPGQVTEQQQLQTRANVTRL
CQVTSTDHGRTWSSPRDLTDAAIGPAYREWSTFAVGPGHCLQLHDRARSLVVPAYAYRKLHP
KQRPIPSAFCFLSHDHGRTWARGHFVAQDTLECQVAEVETGEQRVVTLNARSHLRARVQAQS
TNDGLDFQESQLVKKLVEPPPQGCQGSVISFPSPRSGPGSPAQWLLYTHPTHSWQRADLGAY
LNPRPPAPEAWSEPVLLAKGSAAYSDLQSMGTGPDGSPLFGCLYEANDYEEIVFLMFTLKQA
FPAEYLPQEPKSSDKTHTCPPCPAPELLGGPSVFLFPPKPKDTLMISRTPEVTCVVVDVSHE
DPEVKFNWYVDGVEVHNAKTKPREEQYNSTYRVVSVLTVLHQDWLNGKEYKCKVSNKALPAP
IEKTISKAKGQPREPQVYTLPPSREEMTKNQVSLTCLVKGFYPSDIAVEWESNGQPENNYKT
TPPVLDSDGSFFLYSKLTVDKSRWQQGNVFSCSVMHEALHNHYTQKSLSLSPGK
SEQ ID NO: 136:
DASLPYLQKESVFQSGAHAYRIPALLYLPGQQSLLAFAEQRASKKDEHAELIVLRRGDYDAG
THQVQWQAQEVVAQARLDGHRSMNPCPLYDEQTGTLFLFFIAIPGQVTEQQQLQTRANVTRL
CQVTSTDHGRTWSSPRDLTDAAIGPAYREWSTFAVGPGHCLQLHDRARSLVVPAYAYRKLHP
KQRPIPSAFCFLSHDHGRTWARGHFVAQDTLECQVAEVETGEQRVVTLNARSHLRARVQAQS
TNDGLDFQESQLVKKLVEPPPQGCQGSVISFPSPRSGPGSPAQWLLYTHPTHSWQRADLGAY
LNPRPPAPEAWSEPVLLAKGSAAYSDLQSMGTGPDGSPLFGCLYEANDYEEIVFLMFTLKQA
FPAEYLPQEPKSSDKTHTCPPCPAPELLGGPSVFLFPPKPKDTLMISRTPEVTCVVVDVSHE
DPEVKFNWYVDGVEVHNAKTKPREEQYNSTYRVVSVLTVLHQDWLNGKEYKCKVSNKALPAP
IEKTISKAKGQPREPQVYTLPPSREEMTKNQVSLTCLVKGFYPSDIAVEWESNGQPENNYKT
TPPVLDSDGSFFLYSKLTVDKSRWQQGNVFSCSVMHEALHNHYTQKSLSLSPGK
SEQ ID NO: 137:
DASLPYLQDESVFQSGAHAYRIPALLYLPGQQSLLAFAEQRASKKDEHAELIVLRRGDYDAP
THQVQWQAQEVVAQARLDGHRSMNPCPLYDEQTGTLFLFFIAIPGQVTEQQQLQTRANVTRL
CQVTSTDHGRTWSSPRDLTDAAIGPAYREWSTFAVGPGHCLQLHDRARSLVVPAYAYRKLHP
KQRPIPSAFCFLSHDHGRTWARGHFVAQDTLECQVAEVETGEQRVVTLNARSHLRARVQAQS
TNDGLDFQESQLVKKLVEPPPQGCQGSVISFPSPRSGPGSPAQWLLYTHPTHSWQRADLGAY
LNPRPPAPEAWSEPVLLAKGSAAYSDLQSMGTGPDGSPLFGCLYEANDYEEIRFIMFTLKQA
FPAEYLPQEPKSSDKTHTCPPCPAPELLGGPSVFLFPPKPKDTLMISRTPEVTCVVVDVSHE
DPEVKFNWYVDGVEVHNAKTKPREEQYNSTYRVVSVLTVLHQDWLNGKEYKCKVSNKALPAP
IEKTISKAKGQPREPQVYTLPPSREEMTKNQVSLTCLVKGFYPSDIAVEWESNGQPENNYKT
TPPVLDSDGSFFLYSKLTVDKSRWQQGNVFSCSVMHEALHNHYTQKSLSLSPGK
SEQ ID NO: 138:
DASLPYLQKESVFQSGAHAYRIPALLYLPGQQSLLAFAEQRASKKDEHAELIVLRRGDYDAN
THQVQWQAQEVVAQARLDGHRSMNPCPLYDAQTGTLFLFFIAIPGQVTEQQQLQTRANVTRL
CQVTSTDHGRTWSSPRDLTDAAIGPAYREWSTFAVGPGHCLQLHDRARSLVVPAYAYRKLHP
KQRPIPSAFCELSHDHGRTWARGHEVAQDTLECQVAEVETGEQRVVTLNARSHLRARVQAQS
TNDGLDFQESQLVKKLVEPPPQGCQGSVISFPSPRSGPGSPAQWLLYTHPTHSWQRADLGAY
LNPRPPAPEAWSEPVLLAKGSAAYSDLQSMGTGPDGSPLFGCLYEANDYEEIVFLMFTLKQA
FPAEYLPQEPKSSDKTHTCPPCPAPELLGGPSVFLFPPKPKDTLMISRTPEVTCVVVDVSHE
DPEVKFNWYVDGVEVHNAKTKPREEQYNSTYRVVSVLTVLHQDWLNGKEYKCKVSNKALPAP
IEKTISKAKGQPREPQVYTLPPSREEMTKNQVSLTCLVKGFYPSDIAVEWESNGQPENNYKT
TPPVLDSDGSFFLYSKLTVDKSRWQQGNVFSCSVMHEALHNHYTOKSLSLSPGK
SEQ ID NO: 139:
DASLPYLQKESVFQSGAHAYRIPALLYLPGQQSLLAFAEQRASKKDEHAELIVLRRGDYDAP
THQVQWQAQEVVAQARLDGHRSMNPCPLYDAQTGTLFLFFIAIPGQVTEQQQLQTRANVTRL
CQVTSTDHGRTWSSPRDLTDAAIGPAYREWSTFAVGPGHCLQLHDRARSLVVPAYAYRKLHP
KQRPIPSAFCFLSHDHGRTWARGHFVAQDTLECQVAEVETGEQRVVTLNARSHLRARVQAQS
TNDGLDFQESQLVKKLVEPPPAGCQGSVISFPSPRSGPGSPAQWLLYTHPTHRKQRADLGAY
LNPRPPAPEAWSEPVLLAKGSAAYSDLQSMGTGPDGSPLFGCLYEANDYEEIVFLMFTLKQA
FPAEYLPQEPKSSDKTHTCPPCPAPELLGGPSVFLFPPKPKDTLMISRTPEVTCVVVDVSHE
DPEVKFNWYVDGVEVHNAKTKPREEQYNSTYRVVSVLTVLHQDWLNGKEYKCKVSNKALPAP
IEKTISKAKGQPREPQVYTLPPSREEMTKNQVSLTCLVKGFYPSDIAVEWESNGQPENNYKT
TPPVLDSDGSFFLYSKLTVDKSRWQQGNVFSCSVMHEALHNHYTQKSLSLSPGK
SEQ ID NO: 140:
DASLPYLQKESVFQSGAHAYRIPALLYLPGQQSLLAFAEQRASKKDEHAELIVLRRGDYDAS
THQVQWQAQEVVAQARLDGHRSMNPCPLYDAQTGTLFLFFIAIPGQVTEQQQLQTRANVTRL
CQVTSTDHGRTWSSPRDLTDAAIGPAYREWSTFAVGPGHCLQLHDRARSLVVPAYAYRKLHP
KQRPIPSAFCFLSHDHGRTWARGHFVAQDTLECQVAEVETGEQRVVTLNARSHLRARVQAQS
TNDGLDFQESQLVKKLVEPPPAGCQGSVISFPSPRSGPGSPAQWLLYTHPTHRKQRADLGAY
LNPRPPAPEAWSEPVLLAKGSAAYSDLQSMGTGPDGSPLFGCLYEANDYEEIVFLMFTLKQA
FPAEYLPQEPKSSDKTHTCPPCPAPELLGGPSVFLFPPKPKDTLMISRTPEVTCVVVDVSHE
DPEVKFNWYVDGVEVHNAKTKPREEQYNSTYRVVSVLTVLHQDWLNGKEYKCKVSNKALPAP
IEKTISKAKGQPREPQVYTLPPSREEMTKNQVSLTCLVKGFYPSDIAVEWESNGQPENNYKT
TPPVLDSDGSFFLYSKLTVDKSRWQQGNVFSCSVMHEALHNHYTQKSLSLSPGK
SEQ ID NO: 141:
DASLPYLQKESVFQSGAHAYRIPALLYLPGQQSLLAFAEQRASKKDEHAELIVLRRGDYDAT
THQVQWQAQEVVAQARLDGHRSMNPCPLYDAQTGTLFLFFIAIPGQVTEQQQLQTRANVTRL
CQVTSTDHGRTWSSPRDLTDAAIGPAYREWSTFAVGPGHCLQLHDRARSLVVPAYAYRKLHP
KQRPIPSAFCFLSHDHGRTWARGHFVAQDTLECQVAEVETGEQRVVTLNARSHLRARVQAQS
TNDGLDFQESQLVKKLVEPPPAGCQGSVISFPSPRSGPGSPAQWLLYTHPTHRKQRADLGAY
LNPRPPAPEAWSEPVLLAKGSAAYSDLQSMGTGPDGSPLFGCLYEANDYEEIVFLMFTLKQA
FPAEYLPQEPKSSDKTHTCPPCPAPELLGGPSVFLFPPKPKDTLMISRTPEVTCVVVDVSHE
DPEVKFNWYVDGVEVHNAKTKPREEQYNSTYRVVSVLTVLHQDWLNGKEYKCKVSNKALPAP
IEKTISKAKGQPREPQVYTLPPSREEMTKNQVSLTCLVKGFYPSDIAVEWESNGQPENNYKT
TPPVLDSDGSFFLYSKLTVDKSRWQQGNVFSCSVMHEALHNHYTQKSLSLSPGK
SEQ ID NO: 142:
DASLPYLQKESVFQSGAHAYRIPALLYLPGQQSLLAFAEQRASKKDEHAELIVLRRGDYDAN
THQVQWQAQEVVAQARLDGHRSMNPCPLYDAQTGTLFLFFIAIPGQVTEQQQLQTRANVTRL
CQVTSTDHGRTWSSPRDLTDAAIGPAYREWSTFAVGPGHCLQLHDRARSLVVPAYAYRKLHP
KQRPIPSAFCFLSHDHGRTWARGHFVAQDTLECQVAEVETGEQRVVTLNARSHLRARVQAQS
TNDGLDFQESQLVKKLVEPPPAGCQGSVISFPSPRSGPGSPAQWLLYTHPTHRKQRADLGAY
LNPRPPAPEAWSEPVLLAKGSAAYSDLQSMGTGPDGSPLFGCLYEANDYEEIVFLMFTLKQA
FPAEYLPQEPKSSDKTHTCPPCPAPELLGGPSVFLFPPKPKDTLMISRTPEVTCVVVDVSHE
DPEVKFNWYVDGVEVHNAKTKPREEQYNSTYRVVSVLTVLHQDWLNGKEYKCKVSNKALPAP
IEKTISKAKGQPREPQVYTLPPSREEMTKNQVSLTCLVKGFYPSDIAVEWESNGQPENNYKT
TPPVLDSDGSFFLYSKLTVDKSRWQQGNVFSCSVMHEALHNHYTQKSLSLSPGK
SEQ ID NO: 143
X₁X₂SX₃X₄X₅LQX₆ESVFQSGAHAYRIPALLYLPGQQSLLAFAEQRASX₇X₈DEHAELIVX₉RR
GDYDAX₁₀THQVQWX₁₁AQEWAQAX₁₂LDGHRSMNPCPLYDX₁₃QTGTLFLFFIAIPX₁₄X₁₅VT
EX₁₆QQLQTRANVTRLX₁₇X₁₈VTSTDHGRTWSSPRDLTDAAIGPX₁₉YREWSTFAVGPGHX₂₀L
QLHDRX₂₁RSLVVPAYAYRKLHPX₂₂QRPIPSAFX₂₃FLSHDHGRTWARGHFVAQDTX₂₄ECQVA
EVETGEQRVVTLNARSHLRARVQAQSX₂₅NX₂₆GLDFQX₂₇SQLVKKLVEPPPX₂₈GX₂₉QGSVI
SFPSPRSGPGSPAQX₃₀LLYTHPTHX₃₁X₃₂QRADLGAYLNPRPPAPEAWSEPX₃₃LLAKGSX₃₄
AYSDLQSMGTGPDGSPLFGX₃₅LYEANDYEEIX₃₆FX₃₇MFTLKQAFPAEYLPQX₃₈DKTHTCPP
CPAPELLGGPSVFLFPPKPKDTLMISRTPEVTCVVVDVSHEDPEVKFNWYVDGVEVHNAKTK
PREEQYNSTYRVVSVLTVLHQDWLNGKEYKCKVSNKALPAPIEKTISKAKGQPREPQVYTLP
PSREEMTKNQVSLTCLVKGFYPSDIAVEWESNGQPENNYKTTPPVLDSDGSFFLTSKLTVDK
SRWQQGNVFSCSVMHEALHNHYTQKSLSLSPGK
SEQ ID NO: 144:
X₁ASLPX₂LQX₃ESVFQSGAHAYRIPALLYLPGQQSLLAFAEQRASKKDEHAELIVLRRGDYD
AX₄THQVQWQAQEWAQARLDGHRSMNPCPLYDX₅QTGTLFLFFIAIPGQVTEQQQLQTRANV
TRLCQVTSTDHGRTWSSPRDLTDAAIGPAYREWSTFAVGPGHCLQLHDRARSLVVPAYAYRK
LHPX₆QRPIPSAFCFLSHDHGRTWARGHFVAQDTLECQVAEVETGEQRVVTLNARSHLRARV
QAQSTNDGLDFQESQLVKKLVEPPPX₇GCQGSVISFPSPRSGPGSPAQWLLYTHPTHX₈X₉QR
ADLGAYLNPRPPAPEAWSEPVLLAKGSX₁₀AYSDLQSMGTGPDGSPLFGCLYEANDYEEIX₁₁
FX₁₂MFTLKQAFPAEYLPQX₁₃DKTHTCPPCPAPELLGGPSVFLFPPKPKDTLMISRTPEVTC
VVVDVSHEDPEVKFNWYVDGVEVHNAKTKPREEQYNSTYRVVSVLTVLHQDWLNGKEYKCKV
SNKALPAPIEKTISKAKGQPREPQVYTLPPSREEMTKNQVSLTCLVKGFYPSDIAVEWESNG
QPENNYKTTPPVLDSDGSFFLTSKLTVDKSRWQQGNVFSCSVMHEALHNHYTQKSLSLSPGK
SEQ ID NO: 145:
GGGGSGGGGS
SEQ ID NO: 146:
EPKSS
SEQ ID NO: 147:
EPKSCDKTHTCPPCPAPELLGGPSVFLFPPKPKDTLMISRTPEVTCVVVDVSHEDPEVKFNW
YVDGVEVHNAKTKPREEQYNSTYRVVSVLTVLHQDWLNGKEYKCKVSNKALPAPIEKTISKA
KGQPREPQVYTLPPSREEMTKNQVSLTCLVKGFYPSDIAVEWESNGQPENNYKTTPPVLDSD
GSFFLTSKLTVDKSRWQQGNVFSCSVMHEALHNHYTQKSLSLSPGK
SEQ ID NO: 148:
DKTHTCPPCPAPELLGGPSVFLFPPKPKDTLMISRTPEVTCVVVDVSHEDPEVKFNWYVDGV
EVHNAKTKPREEQYNSTYRVVSVLTVLHQDWLNGKEYKCKVSNKALPAPIEKTISKAKGQPR
EPQVYTLPPSREEMTKNQVSLYCLVKGFYPSDIAVEWESNGQPENNYKTTPPVLDSDGSFFL
YSKLTVDKSRWQQGNVFSCSVMHEALHNHYTQKSLSLSPGK
SEQ ID NO: 149:
DASLPYLQKESVFQSGAHAYRIPALLYLPGQQSLLAFAEQRASKKDEHAELIVLRRGDYDAG
THQVQWQAQEVVAQARLDGHRSMNPCPLYDEQTGTLFLFFIAIPGQVTEQQQLQTRANVTRL
CQVTSTDHGRTWSSPRDLTDAAIGPAYREWSTFAVGPGHCLQLHDRARSLVVPAYAYRKLHP
KQRPIPSAFCFLSHDHGRTWARGHFVAQDTLECQVAEVETGEQRVVTLNARSHLRARVQAQS
TNDGLDFQESQLVKKLVEPPPQGCQGSVISFPSPRSGPGSPAQWLLYTHPTHARQRADLGAY
LNPRPPAPEAWSEPVLLAKGSAAYSDLQSMGTGPDGSPLFGCLYEANDYEEIVFLMFTLKQA
FPAEYLPQ
SEQ ID NO: 150:
DASLPYLQKESVFQSGAHAYRIPALLYLPGQQSLLAFAEQRASKKDEHAELIVLRRGDYDAG
THQVQWQAQEVVAQARLDGHRSMNPCPLYDEQTGTLFLFFIAIPGQVTEQQQLQTRANVTRL
CQVTSTDHGRTWSSPRDLTDAAIGPAYREWSTFAVGPGHCLQLHDRARSLVVPAYAYRKLHP
KQRPIPSAFCFLSHDHGRTWARGHFVAQDTLECQVAEVETGEQRVVTLNARSHLRARVQAQS
TNDGLDFQESQLVKKLVEPPPQGCQGSVISFPSPRSGPGSPAQWLLYTHPTHARQRADLGAY
LNPRPPAPEAWSEPVLLAKGSAAYSDLQSMGTGPDGSPLFGCLYEANDYEEIVFLMFTLKQA
FPAEYLPQGGGGSGGGGSDKTHTCPPCPAPELLGGPSVFLFPPKPKDTLMISRTPEVTCVVV
DVSHEDPEVKFNWYVDGVEVHNAKTKPREEQYNSTYRVVSVLTVLHQDWLNGKEYKCKVSNK
ALPAPIEKTISKAKGQPREPQVYTLPPSREEMTKNQVSLTCLVKGFYPSDIAVEWESNGQPE
NNYKTTPPVLDSDGSFFLTSKLTVDKSRWQQGNVFSCSVMHEALHNHYTQKSLSLSPGK
SEQ ID NO: 151:
DASLPYLQKESVFQSGAHAYRIPALLYLPGQQSLLAFAEQRASKKDEHAELIVLRRGDYDAG
THQVQWQAQEVVAQARLDGHRSMNPCPLYDEQTGTLFLFFIAIPGQVTEQQQLQTRANVTRL
CQVTSTDHGRTWSSPRDLTDAAIGPAYREWSTFAVGPGHCLQLHDRARSLVVPAYAYRKLHP
KQRPIPSAFCFLSHDHGRTWARGHFVAQDTLECQVAEVETGEQRVVTLNARSHLRARVQAQS
TNDGLDFQESQLVKKLVEPPPQGCQGSVISFPSPRSGPGSPAQWLLYTHPTHARQRADLGAY
LNPRPPAPEAWSEPVLLAKGSAAYSDLQSMGTGPDGSPLFGCLYEANDYEEIVFLMFTLKQA
FPAEYLPQEPKSSDKTHTCPPCPAPELLGGPSVFLFPPKPKDTLMISRTPEVTCVVVDVSHE
DPEVKFNWYVDGVEVHNAKTKPREEQYNSTYRVVSVLTVLHQDWLNGKEYKCKVSNKALPAP
IEKTISKAKGQPREPQVYTLPPSREEMTKNQVSLTCLVKGFYPSDIAVEWESNGQPENNYKT
TPPVLDSDGSFFLTSKLTVDKSRWQQGNVFSCSVMHEALHNHYTQKSLSLSPGK
SEQ ID NO: 152:
DASLPYLQKESVFQSGAHAYRIPALLYLPGQQSLLAFAEQRASKKDEHAELIVLRRGDYDAG
THQVQWQAQEVVAQARLDGHRSMNPCPLYDEQTGTLFLFFIAIPGQVTEQQQLQTRANVTRL
CQVTSTDHGRTWSSPRDLTDAAIGPAYREWSTFAVGPGHCLQLHDRARSLVVPAYAYRKLHP
KQRPIPSAFCFLSHDHGRTWARGHFVAQDTLECQVAEVETGEQRVVTLNARSHLRARVQAQS
TNDGLDFQESQLVKKLVEPPPQGCQGSVISFPSPRSGPGSPAQWLLYTHPTHARQRADLGAY
LNPRPPAPEAWSEPVLLAKGSAAYSDLQSMGTGPDGSPLFGCLYEANDYEEIVFLMFTLKQA
FPAEYLPQGGGGSGGGGSDKTHTCPPCPAPELLGGPSVFLFPPKPKDTLMISRTPEVTCVVV
DVSHEDPEVKFNWYVDGVEVHNAKTKPREEQYNSTYRVVSVLTVLHQDWLNGKEYKCKVSNK
ALPAPIEKTISKAKGQPREPQVYTLPPSREEMTKNQVSLTCLVKGFYPSDIAVEWESNGQPE
NNYKTTPPVLDSDGSFFLYSKLTVDKSRWQQGNVFSCSVMHEALHNHYTQKSLSLSPGK
SEQ ID NO: 153:
DASLPYLQKESVFQSGAHAYRIPALLYLPGQQSLLAFAEQRASKKDEHAELIVLRRGDYDAG
THQVQWQAQEVVAQARLDGHRSMNPCPLYDEQTGTLFLFFIAIPGQVTEQQQLQTRANVTRL
CQVTSTDHGRTWSSPRDLTDAAIGPAYREWSTFAVGPGHCLQLHDRARSLVVPAYAYRKLHP
KQRPIPSAFCFLSHDHGRTWARGHFVAQDTLECQVAEVETGEQRVVTLNARSHLRARVQAQS
TNDGLDFQESQLVKKLVEPPPQGCQGSVISFPSPRSGPGSPAQWLLYTHPTHARQRADLGAY
LNPRPPAPEAWSEPVLLAKGSAAYSDLQSMGTGPDGSPLFGCLYEANDYEEIVFLMFTLKQA
FPAEYLPQEPKSSDKTHTCPPCPAPELLGGPSVFLFPPKPKDTLMISRTPEVTCVVVDVSHE
DPEVKFNWYVDGVEVHNAKTKPREEQYNSTYRVVSVLTVLHQDWLNGKEYKCKVSNKALPAP
IEKTISKAKGQPREPQVYTLPPSREEMTKNQVSLTCLVKGFYPSDIAVEWESNGQPENNYKT
TPPVLDSDGSFFLYSKLTVDKSRWQQGNVFSCSVMHEALHNHYTQKSLSLSPGK
SEQ ID NO: 154:
DASLPYLQKESVFQSGAHAYRIPALLYLPGQQSLLAFAEQRASKKDEHAELIVLRRGDYDAG
THQVQWQAQEVVAQARLDGHRSMNPCPLYDEQTGTLFLFFIAIPGQVTEQQQLQTRANVTRL
CYVTSTDHGRTWSSPRDLTDAAIGPAYREWSTFAVGPGHCLQLHDRARSLVVPAYAYRKLHP
KQRPIPSAFCFLSHDHGRTWARGHFVAQDTLECQVAEVETGEQRVVTLNARSHLRARVQAQS
TNDGLDFQESQLVKKLVEPPPTGCQGSVISFPSPRSGPGSPAQWLLYTHPTHSWQRADLGAY
LNPRPPAPEAWSEPVLLAKGSAAYSDLQSMGTGPDGSPLFGCLYEANDYEEIVFLMFTLKQA
FPAEYLPQ
SEQ ID NO: 155:
DASLPYLQKESVFQSGAHAYRIPALLYLPGQQSLLAFAEQRASKKDEHAELIVLRRGDYDAG
THQVQWQAQEVVAQARLDGHRSMNPCPLYDEQTGTLFLFFIAIPGQVTEQQQLQTRANVTRL
CYVTSTDHGRTWSSPRDLTDAAIGPAYREWSTFAVGPGHCLQLHDRARSLVVPAYAYRKLHP
KQRPIPSAFCFLSHDHGRTWARGHFVAQDTLECQVAEVETGEQRVVTLNARSHLRARVQAQS
TNDGLDFQESQLVKKLVEPPPTGCQGSVISFPSPRSGPGSPAQWLLYTHPTHSWQRADLGAY
LNPRPPAPEAWSEPVLLAKGSAAYSDLQSMGTGPDGSPLFGCLYEANDYEEIVFLMFTLKQA
FPAEYLPQGGGGSGGGGSDKTHTCPPCPAPELLGGPSVFLFPPKPKDTLMISRTPEVTCVVV
DVSHEDPEVKFNWYVDGVEVHNAKTKPREEQYNSTYRVVSVLTVLHQDWLNGKEYKCKVSNK
ALPAPIEKTISKAKGQPREPQVYTLPPSREEMTKNQVSLTCLVKGFYPSDIAVEWESNGQPE
NNYKTTPPVLDSDGSFFLTSKLTVDKSRWQQGNVFSCSVMHEALHNHYTQKSLSLSPGK
SEQ ID NO: 156:
DASLPYLQKESVFQSGAHAYRIPALLYLPGQQSLLAFAEQRASKKDEHAELIVLRRGDYDAG
THQVQWQAQEVVAQARLDGHRSMNPCPLYDEQTGTLFLFFIAIPGQVTEQQQLQTRANVTRL
CYVTSTDHGRTWSSPRDLTDAAIGPAYREWSTFAVGPGHCLQLHDRARSLVVPAYAYRKLHP
KQRPIPSAFCFLSHDHGRTWARGHFVAQDTLECQVAEVETGEQRVVTLNARSHLRARVQAQS
TNDGLDFQESQLVKKLVEPPPTGCQGSVISFPSPRSGPGSPAQWLLYTHPTHSWQRADLGAY
LNPRPPAPEAWSEPVLLAKGSAAYSDLQSMGTGPDGSPLFGCLYEANDYEEIVFLMFTLKQA
FPAEYLPQEPKSSDKTHTCPPCPAPELLGGPSVFLFPPKPKDTLMISRTPEVTCVVVDVSHE
DPEVKFNWYVDGVEVHNAKTKPREEQYNSTYRVVSVLTVLHQDWLNGKEYKCKVSNKALPAP
IEKTISKAKGQPREPQVYTLPPSREEMTKNQVSLTCLVKGFYPSDIAVEWESNGQPENNYKT
TPPVLDSDGSFFLTSKLTVDKSRWQQGNVFSCSVMHEALHNHYTQKSLSLSPGK
SEQ ID NO: 157:
DASLPYLQKESVFQSGAHAYRIPALLYLPGQQSLLAFAEQRASKKDEHAELIVLRRGDYDAG
THQVQWQAQEVVAQARLDGHRSMNPCPLYDEQTGTLFLFFIAIPGQVTEQQQLQTRANVTRL
CYVTSTDHGRTWSSPRDLTDAAIGPAYREWSTFAVGPGHCLQLHDRARSLVVPAYAYRKLHP
KQRPIPSAFCFLSHDHGRTWARGHFVAQDTLECQVAEVETGEQRVVTLNARSHLRARVQAQS
TNDGLDFQESQLVKKLVEPPPTGCQGSVISFPSPRSGPGSPAQWLLYTHPTHSWQRADLGAY
LNPRPPAPEAWSEPVLLAKGSAAYSDLQSMGTGPDGSPLFGCLYEANDYEEIVFLMFTLKQA
FPAEYLPQGGGGSGGGGSDKTHTCPPCPAPELLGGPSVFLFPPKPKDTLMISRTPEVTCVVV
DVSHEDPEVKFNWYVDGVEVHNAKTKPREEQYNSTYRVVSVLTVLHQDWLNGKEYKCKVSNK
ALPAPIEKTISKAKGQPREPQVYTLPPSREEMTKNQVSLTCLVKGFYPSDIAVEWESNGQPE
NNYKTTPPVLDSDGSFFLYSKLTVDKSRWQQGNVFSCSVMHEALHNHYTQKSLSLSPGK
SEQ ID NO: 158:
DASLPYLQKESVFQSGAHAYRIPALLYLPGQQSLLAFAEQRASKKDEHAELIVLRRGDYDAG
THQVQWQAQEVVAQARLDGHRSMNPCPLYDEQTGTLFLFFIAIPGQVTEQQQLQTRANVTRL
CYVTSTDHGRTWSSPRDLTDAAIGPAYREWSTFAVGPGHCLQLHDRARSLVVPAYAYRKLHP
KQRPIPSAFCFLSHDHGRTWARGHFVAQDTLECQVAEVETGEQRVVTLNARSHLRARVQAQS
TNDGLDFQESQLVKKLVEPPPTGCQGSVISFPSPRSGPGSPAQWLLYTHPTHSWQRADLGAY
LNPRPPAPEAWSEPVLLAKGSAAYSDLQSMGTGPDGSPLFGCLYEANDYEEIVFLMFTLKQA
FPAEYLPQEPKSSDKTHTCPPCPAPELLGGPSVFLFPPKPKDTLMISRTPEVTCVVVDVSHE
DPEVKFNWYVDGVEVHNAKTKPREEQYNSTYRVVSVLTVLHQDWLNGKEYKCKVSNKALPAP
IEKTISKAKGQPREPQVYTLPPSREEMTKNQVSLTCLVKGFYPSDIAVEWESNGQPENNYKT
TPPVLDSDGSFFLYSKLTVDKSRWQQGNVFSCSVMHEALHNHYTQKSLSLSPGK
SEQ ID NO: 159:
DASLPYLQKESVFQSGAHAYRIPALLYLPGQQSLLAFAEQRASKKDEHAELIVLRRGDYDAG
THQVQWQAQEVVAQARLDGHRSMNPCPLYDEQTGTLFLFFIAIPGQVTEQQQLQTRANVTRL
CYVTSTDHGRTWSSPRDLTDAAIGPAYREWSTFAVGPGHCLQLHDRARSLVVPAYAYRKLHP
KQRPIPSAFCFLSHDHGRTWARGHFVAQDTLECQVAEVETGEQRVVTLNARSHLRFRVQAQS
TNDGLDFQESQLVKKLVEPPPTGCQGSVISFPSPRSGPGSPAQWLLYTHPTHSWQRADLGAY
LNPRPPAPEAWSEPVLLAKGSAAYSDLQSMGTGPDGSPLFGCLYEANDYEEIVFLMFTLKQA
FPAEYLPQ
SEQ ID NO: 160:
DASLPYLQKESVFQSGAHAYRIPALLYLPGQQSLLAFAEQRASKKDEHAELIVLRRGDYDAG
THQVQWQAQEVVAQARLDGHRSMNPCPLYDEQTGTLFLFFIAIPGQVTEQQQLQTRANVTRL
CYVTSTDHGRTWSSPRDLTDAAIGPAYREWSTFAVGPGHCLQLHDRARSLVVPAYAYRKLHP
KQRPIPSAFCFLSHDHGRTWARGHFVAQDTLECQVAEVETGEQRVVTLNARSHLRFRVQAQS
TNDGLDFQESQLVKKLVEPPPTGCQGSVISFPSPRSGPGSPAQWLLYTHPTHSWQRADLGAY
LNPRPPAPEAWSEPVLLAKGSAAYSDLQSMGTGPDGSPLFGCLYEANDYEEIVFLMFTLKQA
FPAEYLPQGGGGSGGGGSDKTHTCPPCPAPELLGGPSVFLFPPKPKDTLMISRTPEVTCVVV
DVSHEDPEVKFNWYVDGVEVHNAKTKPREEQYNSTYRVVSVLTVLHQDWLNGKEYKCKVSNK
ALPAPIEKTISKAKGQPREPQVYTLPPSREEMTKNQVSLTCLVKGFYPSDIAVEWESNGQPE
NNYKTTPPVLDSDGSFFLTSKLTVDKSRWQQGNVFSCSVMHEALHNHYTQKSLSLSPGK
SEQ ID NO: 161:
DASLPYLQKESVFQSGAHAYRIPALLYLPGQQSLLAFAEQRASKKDEHAELIVLRRGDYDAG
THQVQWQAQEVVAQARLDGHRSMNPCPLYDEQTGTLFLFFIAIPGQVTEQQQLQTRANVTRL
CYVTSTDHGRTWSSPRDLTDAAIGPAYREWSTFAVGPGHCLQLHDRARSLVVPAYAYRKLHP
KQRPIPSAFCFLSHDHGRTWARGHFVAQDTLECQVAEVETGEQRVVTLNARSHLRFRVQAQS
TNDGLDFQESQLVKKLVEPPPTGCQGSVISFPSPRSGPGSPAQWLLYTHPTHSWQRADLGAY
LNPRPPAPEAWSEPVLLAKGSAAYSDLQSMGTGPDGSPLFGCLYEANDYEEIVFLMFTLKQA
FPAEYLPQEPKSSDKTHTCPPCPAPELLGGPSVFLFPPKPKDTLMISRTPEVTCVVVDVSHE
DPEVKFNWYVDGVEVHNAKTKPREEQYNSTYRVVSVLTVLHQDWLNGKEYKCKVSNKALPAP
IEKTISKAKGQPREPQVYTLPPSREEMTKNQVSLTCLVKGFYPSDIAVEWESNGQPENNYKT
TPPVLDSDGSFFLTSKLTVDKSRWQQGNVFSCSVMHEALHNHYTQKSLSLSPGK
SEQ ID NO: 162:
DASLPYLQKESVFQSGAHAYRIPALLYLPGQQSLLAFAEQRASKKDEHAELIVLRRGDYDAG
THQVQWQAQEVVAQARLDGHRSMNPCPLYDEQTGTLFLFFIAIPGQVTEQQQLQTRANVTRL
CYVTSTDHGRTWSSPRDLTDAAIGPAYREWSTFAVGPGHCLQLHDRARSLVVPAYAYRKLHP
KQRPIPSAFCFLSHDHGRTWARGHFVAQDTLECQVAEVETGEQRVVTLNARSHLRFRVQAQS
TNDGLDFQESQLVKKLVEPPPTGCQGSVISFPSPRSGPGSPAQWLLYTHPTHSWQRADLGAY
LNPRPPAPEAWSEPVLLAKGSAAYSDLQSMGTGPDGSPLFGCLYEANDYEEIVFLMFTLKQA
FPAEYLPQGGGGSGGGGSDKTHTCPPCPAPELLGGPSVFLFPPKPKDTLMISRTPEVTCVVV
DVSHEDPEVKFNWYVDGVEVHNAKTKPREEQYNSTYRVVSVLTVLHQDWLNGKEYKCKVSNK
ALPAPIEKTISKAKGQPREPQVYTLPPSREEMTKNQVSLTCLVKGFYPSDIAVEWESNGQPE
NNYKTTPPVLDSDGSFFLYSKLTVDKSRWQQGNVFSCSVMHEALHNHYTQKSLSLSPGK
SEQ ID NO: 163:
DASLPYLQKESVFQSGAHAYRIPALLYLPGQQSLLAFAEQRASKKDEHAELIVLRRGDYDAG
THQVQWQAQEVVAQARLDGHRSMNPCPLYDEQTGTLFLFFIAIPGQVTEQQQLQTRANVTRL
CYVTSTDHGRTWSSPRDLTDAAIGPAYREWSTFAVGPGHCLQLHDRARSLVVPAYAYRKLHP
KQRPIPSAFCFLSHDHGRTWARGHFVAQDTLECQVAEVETGEQRVVTLNARSHLRFRVQAQS
TNDGLDFQESQLVKKLVEPPPTGCQGSVISFPSPRSGPGSPAQWLLYTHPTHSWQRADLGAY
LNPRPPAPEAWSEPVLLAKGSAAYSDLQSMGTGPDGSPLFGCLYEANDYEEIVFLMFTLKQA
FPAEYLPQEPKSSDKTHTCPPCPAPELLGGPSVFLFPPKPKDTLMISRTPEVTCVVVDVSHE
DPEVKFNWYVDGVEVHNAKTKPREEQYNSTYRVVSVLTVLHQDWLNGKEYKCKVSNKALPAP
IEKTISKAKGQPREPQVYTLPPSREEMTKNQVSLTCLVKGFYPSDIAVEWESNGQPENNYKT
TPPVLDSDGSFFLYSKLTVDKSRWQQGNVFSCSVMHEALHNHYTOKSLSLSPGK
SEQ ID NO: 164:
X₁ASLPX₂LQX₃ESVFQSGAHAYRIPALLYLPGQQSLLAFAEQRASKKDEHAELIVLRRGDYD
AX₄THQVQWQAQEVVAQARLDGHRSMNPCPLYDX₅QTGTLFLFFIAIPGQVTEQQQLQTRANV
TRLCX₆VTSTDHGRTWSSPRDLTDAAIGPAYREWSTFAVGPGHCLQLHDRARSLVVPAYAYR
KLHPX₇QRPIPSAFCFLSHDHGRTWARGHFVAQDTLECQVAEVETGEQRVVTLNARSHLRX₈R
VQAQSTNDGLDFQESQLVKKLVEPPPX₉GCQGSVISFPSPRSGPGSPAQWLLYTHPTHX₁₀X₁₁
QRADLGAYLNPRPPAPEAWSEPVLLAKGSX₁₂AYSDLQSMGTGPDGSPLFGCLYEANDYEEIX₁₃
FX₁₄MFTLKQAFPAEYLPQX₁₅DKTHTCPPCPAPELLGGPSVFLFPPKPKDTLMISRTPEVT
CVVVDVSHEDPEVKFNWYVDGVEVHNAKTKPREEQYNSTYRVVSVLTVLHQDWLNGKEYKCK
VSNKALPAPIEKTISKAKGQPREPQVYTLPPSREEMTKNQVSLTCLVKGFYPSDIAVEWESN
GQPENNYKTTPPVLDSDGSFFLTSKLTVDKSRWQQGNVFSCSVMHEALHNHYTQKSLSLSPG
K
SEQ ID NO: 165:
X₁X₂SX₃X₄X₅LQX₆ESVFQSGAHAYRIPALLYLPGQQSLLAFAEQRASX₇X₈DEHAELIVX₉RR
GDYDAX₁₀THQVQWX₁₁AQEWAQAX₁₂LX₁₃GHRSMNPCPLYDX_{14Q}TGTLFLFFIAIPX₁₅X₁₆V
TEX₁₇QQLQTRANVTRLX₁₈X₁₉VTSTDHGRTWSSPRDLTDAAIGPX₂₀YREWSTFAVGPGHX₂₁
LQLHDX2₂X₂₃RSLVVPAYAYRKLHPX₂₄X₂₅X₂₆PIPSAFX₂₇FLSHDHGRTWARGHFVX₂₈QDTX₂₉
ECQVAEVX₃₀TGEQRWTLNARSX₃₁X₃₂X₃₃X₃₄RX₃₅QAQSX₃₆NX₃₇GLDFQX₃₈X₃₉QX₄₀VKKL
X₄₁EPPPX₄₂GX₄₃QGSVISFPSPRSGPGSPAQX₄₄LLYTHPTHX₄₅X₄₆QRADLGAYLNPRPPAP
EAWSEPX₄₇LLAKGSX₄₈AYSDLQSMGTGPDGSPLFGX₄₉LYEANDYEEIX₅₀FX₅₁MFTLKQAF
PAEYLPQX₅₂DKTHTCPPCPAPELLGGPSVFLFPPKPKDTLMISRTPEVTCVVVDVSHEDPEV
KFNWYVDGVEVHNAKTKPREEQYNSTYRVVSVLTVLHQDWLNGKEYKCKVSNKALPAPIEKT
ISKAKGQPREPQVYTLPPSREEMTKNQVSLTCLVKGFYPSDIAVEWESNGQPENNYKTTPPV
LDSDGSFFLTSKLTVDKSRWQQGNVFSCSVMHEALHNHYTQKSLSLSPGK
SEQ ID NO: 166:
DASLPYLQKESVFQSGAHAYRIPALLYLPGQQSLLAFAEQRASKKDEHAELIVLRRGDYDAG
THQVQWQAQEVVAQARLDGHRSMNPCPLYDEQTGTLFLFFIAIPGQVTEQQQLQTRANVTRL
CQVTSTDHGRTWSSPRDLTDAAIGPAYREWSTFAVGPGHCLQLHDRARSLVVPAYAYRKLHP
KQRPIPSAFCFLSHDHGRTWARGHFVAQDTLECQVAEVETGEQRVVTLNARSHLRARVQAQS
TNDGLDFQESQLVKKLVEPPPQGCQGSVISFPSPRSGPGSPAQWLLYTHPTHARQRADLGAY
LNPRPPAPEAWSEPVLLAKGSAAYSDLQSMGTGPDGSPLFGCLYEANDYEEIVFLMFTLKQA
FPAEYLPQGGGGSGGGGSDKTHTCPPCPAPELLGGPSVFLFPPKPKDTLMISRTPEVTCVVV
DVSHEDPEVKFNWYVDGVEVHNAKTKPREEQYNSTYRVVSVLTVLHQDWLNGKEYKCKVSNK
ALPAPIEKTISKAKGQPREPQVYTLPPSREEMTKNQVSLTCLVKGFYPSDIAVEWESNGQPE
NNYKTTPPVLDSDGSFFLYSKLTVDKSRWQQGNVFSCSVMHEALHNHYTQKSLSLSPGKGGG
GSGGGGSGGGGSEVQLVESGGGLVQPGGSLRLSCAASGFNIKDTYIHWVRQAPGKGLEWVAR
IYPTNGYTRYADSVKGRFTISADTSKNTAYLQMNSLRAEDTAVYYCSRWGGDGFYAMDYWGQ
GTLVTVSSGGGGSGGGGSGGGGSDIQMTQSPSSLSASVGDRVTITCRASQDVNTAVAWYQQK
PGKAPKLLIYSASFLYSGVPSRFSGSRSGTDFTLTISSLQPEDFATYYCQQHYTTPPTFGQG
TKVEIK
SEQ ID NO: 167:
DASLPYLQKESVFQSGAHAYRIPALLYLPGQQSLLAFAEQRASKKDEHAELIVLRRGDYDAG
THQVQWQAQEVVAQARLDGHRSMNPCPLYDEQTGTLFLFFIAIPGQVTEQQQLQTRANVTRL
CYVTSTDHGRTWSSPRDLTDAAIGPAYREWSTFAVGPGHCLQLHDRARSLVVPAYAYRKLHP
KQRPIPSAFCFLSHDHGRTWARGHFVAQDTLECQVAEVETGEQRVVTLNARSHLRARVQAQS
TNDGLDFQESQLVKKLVEPPPTGCQGSVISFPSPRSGPGSPAQWLLYTHPTHSWQRADLGAY
LNPRPPAPEAWSEPVLLAKGSAAYSDLQSMGTGPDGSPLFGCLYEANDYEEIVFLMFTLKQA
FPAEYLPQGGGGSGGGGSDKTHTCPPCPAPELLGGPSVFLFPPKPKDTLMISRTPEVTCVVV
DVSHEDPEVKFNWYVDGVEVHNAKTKPREEQYNSTYRVVSVLTVLHQDWLNGKEYKCKVSNK
ALPAPIEKTISKAKGQPREPQVYTLPPSREEMTKNQVSLTCLVKGFYPSDIAVEWESNGQPE
NNYKTTPPVLDSDGSFFLYSKLTVDKSRWQQGNVFSCSVMHEALHNHYTQKSLSLSPGKGGG
GSGGGGSGGGGSEVQLVESGGGLVQPGGSLRLSCAASGFNIKDTYIHWVRQAPGKGLEWVAR
IYPTNGYTRYADSVKGRFTISADTSKNTAYLQMNSLRAEDTAVYYCSRWGGDGFYAMDYWGQ
GTLVTVSSGGGGSGGGGSGGGGSDIQMTQSPSSLSASVGDRVTITCRASQDVNTAVAWYQQK
PGKAPKLLIYSASFLYSGVPSRFSGSRSGTDFTLTISSLQPEDFATYYCQQHYTTPPTFGQG
TKVEIK
SEQ ID NO: 168:
DASLPYLQKESVFQSGAHAYRIPALLYLPGQQSLLAFAEQRASKKDEHAELIVLRRGDYDAG
THQVQWQAQEVVAQARLDGHRSMNPCPLYDEQTGTLFLFFIAIPGQVTEQQQLQTRANVTRL
CYVTSTDHGRTWSSPRDLTDAAIGPAYREWSTFAVGPGHCLQLHDRARSLVVPAYAYRKLHP
KQRPIPSAFCFLSHDHGRTWARGHFVAQDTLECQVAEVETGEQRVVTLNARSHLRFRVQAQS
TNDGLDFQESQLVKKLVEPPPTGCQGSVISFPSPRSGPGSPAQWLLYTHPTHSWQRADLGAY
LNPRPPAPEAWSEPVLLAKGSAAYSDLQSMGTGPDGSPLFGCLYEANDYEEIVFLMFTLKQA
FPAEYLPQGGGGSGGGGSDKTHTCPPCPAPELLGGPSVFLFPPKPKDTLMISRTPEVTCVVV
DVSHEDPEVKFNWYVDGVEVHNAKTKPREEQYNSTYRVVSVLTVLHQDWLNGKEYKCKVSNK
ALPAPIEKTISKAKGQPREPQVYTLPPSREEMTKNQVSLTCLVKGFYPSDIAVEWESNGQPE
NNYKTTPPVLDSDGSFFLYSKLTVDKSRWQQGNVFSCSVMHEALHNHYTQKSLSLSPGKGGG
GSGGGGSGGGGSEVQLVESGGGLVQPGGSLRLSCAASGFNIKDTYIHWVRQAPGKGLEWVAR
IYPTNGYTRYADSVKGRFTISADTSKNTAYLQMNSLRAEDTAVYYCSRWGGDGFYAMDYWGQ
GTLVTVSSGGGGSGGGGSGGGGSDIQMTQSPSSLSASVGDRVTITCRASQDVNTAVAWYQQK
PGKAPKLLIYSASFLYSGVPSRFSGSRSGTDFTLTISSLQPEDFATYYCQQHYTTPPTFGQG
TKVEIK
SEQ ID NO: 169:
DASLPYLQKESVFQSGAHAYRIPALLYLPGQQSLLAFAEQRASKKDEHAELIVLRRGDYDAG
THQVQWQAQEVVAQARLDGHRSMNPCPLYDEQTGTLFLFFIAIPGQVTEQQQLQTRANVTRL
CQVTSTDHGRTWSSPRDLTDAAIGPAYREWSTFAVGPGHCLQLHDRARSLVVPAYAYRKLHP
KQRPIPSAFCFLSHDHGRTWARGHFVAQDTLECQVAEVETGEQRVVTLNARSHLRARVQAQS
TNDGLDFQESQLVKKLVEPPPQGCQGSVISFPSPRSGPGSPAQWLLYTHPTHSWQRADLGAY
LNPRPPAPEAWSEPVLLAKGSAAYSDLQSMGTGPDGSPLFGCLYEANDYEEIVFLMFTLKQA
FPAEYLPQEPKSSDKTHTCPPCPAPELLGGPSVFLFPPKPKDTLMISRTPEVTCVVVDVSHE
DPEVKFNWYVDGVEVHNAKTKPREEQYNSTYRVVSVLTVLHQDWLNGKEYKCKVSNKALPAP
IEKTISKAKGQPREPQVYTLPPSREEMTKNQVSLTCLVKGFYPSDIAVEWESNGQPENNYKT
TPPVLDSDGSFFLYSKLTVDKSRWQQGNVFSCSVMHEALHNHYTQKSLSLSPGKGGGGSGGG
GSGGGGSEVQLVESGGGLVQPGGSLRLSCAASGFNIKDTYIHWVRQAPGKGLEWVARIYPTN
GYTRYADSVKGRFTISADTSKNTAYLQMNSLRAEDTAVYYCSRWGGDGFYAMDYWGQGTLVT
VSSGGGGSGGGGSGGGGSDIQMTQSPSSLSASVGDRVTITCRASQDVNTAVAWYQQKPGKAP
KLLIYSASFLYSGVPSRFSGSRSGTDFTLTISSLQPEDFATYYCQQHYTTPPTFGQGTKVEI
K
SEQ ID NO: 170:
DASLPYLQDESVFQSGAHAYRIPALLYLPGQQSLLAFAEQRASKKDEHAELIVLRRGDYDAP
THQVQWQAQEVVAQARLDGHRSMNPCPLYDEQTGTLFLFFIAIPGQVTEQQQLQTRANVTRL
CQVTSTDHGRTWSSPRDLTDAAIGPAYREWSTFAVGPGHCLQLHDRARSLVVPAYAYRKLHP
KQRPIPSAFCFLSHDHGRTWARGHFVAQDTLECQVAEVETGEQRVVTLNARSHLRARVQAQS
TNDGLDFQESQLVKKLVEPPPQGCQGSVISFPSPRSGPGSPAQWLLYTHPTHSWQRADLGAY
LNPRPPAPEAWSEPVLLAKGSAAYSDLQSMGTGPDGSPLFGCLYEANDYEEIRFIMFTLKQA
FPAEYLPQEPKSSDKTHTCPPCPAPELLGGPSVFLFPPKPKDTLMISRTPEVTCVVVDVSHE
DPEVKFNWYVDGVEVHNAKTKPREEQYNSTYRVVSVLTVLHQDWLNGKEYKCKVSNKALPAP
IEKTISKAKGQPREPQVYTLPPSREEMTKNQVSLTCLVKGFYPSDIAVEWESNGQPENNYKT
TPPVLDSDGSFFLYSKLTVDKSRWQQGNVFSCSVMHEALHNHYTQKSLSLSPGKGGGGSGGG
GSGGGGSEVQLVESGGGLVQPGGSLRLSCAASGFNIKDTYIHWVRQAPGKGLEWVARIYPTN
GYTRYADSVKGRFTISADTSKNTAYLQMNSLRAEDTAVYYCSRWGGDGFYAMDYWGQGTLVT
VSSGGGGSGGGGSGGGGSDIQMTQSPSSLSASVGDRVTITCRASQDVNTAVAWYQQKPGKAP
KLLIYSASFLYSGVPSRFSGSRSGTDFTLTISSLQPEDFATYYCQQHYTTPPTFGQGTKVEI
K
SEQ ID NO: 171:
DASLPYLQKESVFQSGAHAYRIPALLYLPGQQSLLAFAEQRASKKDEHAELIVLRRGDYDAN
THQVQWQAQEVVAQARLDGHRSMNPCPLYDAQTGTLFLFFIAIPGQVTEQQQLQTRANVTRL
CQVTSTDHGRTWSSPRDLTDAAIGPAYREWSTFAVGPGHCLQLHDRARSLVVPAYAYRKLHP
KQRPIPSAFCFLSHDHGRTWARGHFVAQDTLECQVAEVETGEQRVVTLNARSHLRARVQAQS
TNDGLDFQESQLVKKLVEPPPQGCQGSVISFPSPRSGPGSPAQWLLYTHPTHSWQRADLGAY
LNPRPPAPEAWSEPVLLAKGSAAYSDLQSMGTGPDGSPLFGCLYEANDYEEIVFLMFTLKQA
FPAEYLPQEPKSSDKTHTCPPCPAPELLGGPSVFLFPPKPKDTLMISRTPEVTCVVVDVSHE
DPEVKFNWYVDGVEVHNAKTKPREEQYNSTYRVVSVLTVLHQDWLNGKEYKCKVSNKALPAP
IEKTISKAKGQPREPQVYTLPPSREEMTKNQVSLTCLVKGFYPSDIAVEWESNGQPENNYKT
TPPVLDSDGSFFLYSKLTVDKSRWQQGNVFSCSVMHEALHNHYTQKSLSLSPGKGGGGSGGG
GSGGGGSEVQLVESGGGLVQPGGSLRLSCAASGFNIKDTYIHWVRQAPGKGLEWVARIYPTN
GYTRYADSVKGRFTISADTSKNTAYLQMNSLRAEDTAVYYCSRWGGDGFYAMDYWGQGTLVT
VSSGGGGSGGGGSGGGGSDIQMTQSPSSLSASVGDRVTITCRASQDVNTAVAWYQQKPGKAP
KLLIYSASFLYSGVPSRFSGSRSGTDFTLTISSLQPEDFATYYCQQHYTTPPTFGQGTKVEI
K
SEQ ID NO: 172:
DASLPYLQKESVFQSGAHAYRIPALLYLPGQQSLLAFAEQRASKKDEHAELIVLRRGDYDAP
THQVQWQAQEVVAQARLDGHRSMNPCPLYDAQTGTLFLFFIAIPGQVTEQQQLQTRANVTRL
CQVTSTDHGRTWSSPRDLTDAAIGPAYREWSTFAVGPGHCLQLHDRARSLVVPAYAYRKLHP
KQRPIPSAFCFLSHDHGRTWARGHFVAQDTLECQVAEVETGEQRVVTLNARSHLRARVQAQS
TNDGLDFQESQLVKKLVEPPPAGCQGSVISFPSPRSGPGSPAQWLLYTHPTHRKQRADLGAY
LNPRPPAPEAWSEPVLLAKGSAAYSDLQSMGTGPDGSPLFGCLYEANDYEEIVFLMETLKQA
FPAEYLPQEPKSSDKTHTCPPCPAPELLGGPSVFLFPPKPKDTLMISRTPEVTCVVVDVSHE
DPEVKFNWYVDGVEVHNAKTKPREEQYNSTYRVVSVLTVLHQDWLNGKEYKCKVSNKALPAP
IEKTISKAKGQPREPQVYTLPPSREEMTKNQVSLTCLVKGFYPSDIAVEWESNGQPENNYKT
TPPVLDSDGSFFLYSKLTVDKSRWQQGNVFSCSVMHEALHNHYTOKSLSLSPGKGGGGSGGG
GSGGGGSEVQLVESGGGLVQPGGSLRLSCAASGFNIKDTYIHWVRQAPGKGLEWVARIYPTN
GYTRYADSVKGRFTISADTSKNTAYLQMNSLRAEDTAVYYCSRWGGDGFYAMDYWGQGTLVT
VSSGGGGSGGGGSGGGGSDIQMTQSPSSLSASVGDRVTITCRASQDVNTAVAWYQQKPGKAP
KLLIYSASFLYSGVPSRFSGSRSGTDFTLTISSLQPEDFATYYCQQHYTTPPTFGQGTKVEI
K
SEQ ID NO: 173:
DASLPYLQKESVFQSGAHAYRIPALLYLPGQQSLLAFAEQRASKKDEHAELIVLRRGDYDAS
THQVQWQAQEVVAQARLDGHRSMNPCPLYDAQTGTLFLFFIAIPGQVTEQQQLQTRANVTRL
CQVTSTDHGRTWSSPRDLTDAAIGPAYREWSTFAVGPGHCLQLHDRARSLVVPAYAYRKLHP
KQRPIPSAFCFLSHDHGRTWARGHFVAQDTLECQVAEVETGEQRVVTLNARSHLRARVQAQS
TNDGLDFQESQLVKKLVEPPPAGCQGSVISFPSPRSGPGSPAQWLLYTHPTHRKQRADLGAY
LNPRPPAPEAWSEPVLLAKGSAAYSDLQSMGTGPDGSPLFGCLYEANDYEEIVFLMFTLKQA
FPAEYLPQEPKSSDKTHTCPPCPAPELLGGPSVFLFPPKPKDTLMISRTPEVTCVVVDVSHE
DPEVKFNWYVDGVEVHNAKTKPREEQYNSTYRVVSVLTVLHQDWLNGKEYKCKVSNKALPAP
IEKTISKAKGQPREPQVYTLPPSREEMTKNQVSLTCLVKGFYPSDIAVEWESNGQPENNYKT
TPPVLDSDGSFFLYSKLTVDKSRWQQGNVFSCSVMHEALHNHYTQKSLSLSPGKGGGGSGGG
GSGGGGSEVQLVESGGGLVQPGGSLRLSCAASGFNIKDTYIHWVRQAPGKGLEWVARIYPTN
GYTRYADSVKGRFTISADTSKNTAYLQMNSLRAEDTAVYYCSRWGGDGFYAMDYWGQGTLVT
VSSGGGGSGGGGSGGGGSDIQMTQSPSSLSASVGDRVTITCRASQDVNTAVAWYQQKPGKAP
KLLIYSASFLYSGVPSRFSGSRSGTDFTLTISSLQPEDFATYYCQQHYTTPPTFGQGTKVEI
K
SEQ ID NO: 174:
DASLPYLQKESVFQSGAHAYRIPALLYLPGQQSLLAFAEQRASKKDEHAELIVLRRGDYDAT
THQVQWQAQEVVAQARLDGHRSMNPCPLYDAQTGTLFLFFIAIPGQVTEQQQLQTRANVTRL
CQVTSTDHGRTWSSPRDLTDAAIGPAYREWSTFAVGPGHCLQLHDRARSLVVPAYAYRKLHP
KQRPIPSAFCFLSHDHGRTWARGHFVAQDTLECQVAEVETGEQRVVTLNARSHLRARVQAQS
TNDGLDFQESQLVKKLVEPPPAGCQGSVISFPSPRSGPGSPAQWLLYTHPTHRKQRADLGAY
LNPRPPAPEAWSEPVLLAKGSAAYSDLQSMGTGPDGSPLFGCLYEANDYEEIVFLMFTLKQA
FPAEYLPQEPKSSDKTHTCPPCPAPELLGGPSVFLFPPKPKDTLMISRTPEVTCVVVDVSHE
DPEVKFNWYVDGVEVHNAKTKPREEQYNSTYRVVSVLTVLHQDWLNGKEYKCKVSNKALPAP
IEKTISKAKGQPREPQVYTLPPSREEMTKNQVSLTCLVKGFYPSDIAVEWESNGQPENNYKT
TPPVLDSDGSFFLYSKLTVDKSRWQQGNVFSCSVMHEALHNHYTQKSLSLSPGKGGGGSGGG
GSGGGGSEVQLVESGGGLVQPGGSLRLSCAASGFNIKDTYIHWVRQAPGKGLEWVARIYPTN
GYTRYADSVKGRFTISADTSKNTAYLQMNSLRAEDTAVYYCSRWGGDGFYAMDYWGQGTLVT
VSSGGGGSGGGGSGGGGSDIQMTQSPSSLSASVGDRVTITCRASQDVNTAVAWYQQKPGKAP
KLLIYSASFLYSGVPSRFSGSRSGTDFTLTISSLQPEDFATYYCQQHYTTPPTFGQGTKVEI
K
SEQ ID NO: 175:
DASLPYLQKESVFQSGAHAYRIPALLYLPGQQSLLAFAEQRASKKDEHAELIVLRRGDYDAN
THQVQWQAQEVVAQARLDGHRSMNPCPLYDAQTGTLFLFFIAIPGQVTEQQQLQTRANVTRL
CQVTSTDHGRTWSSPRDLTDAAIGPAYREWSTFAVGPGHCLQLHDRARSLVVPAYAYRKLHP
KQRPIPSAFCFLSHDHGRTWARGHFVAQDTLECQVAEVETGEQRVVTLNARSHLRARVQAQS
TNDGLDFQESQLVKKLVEPPPAGCQGSVISFPSPRSGPGSPAQWLLYTHPTHRKQRADLGAY
LNPRPPAPEAWSEPVLLAKGSAAYSDLQSMGTGPDGSPLFGCLYEANDYEEIVFLMFTLKQA
FPAEYLPQEPKSSDKTHTCPPCPAPELLGGPSVFLFPPKPKDTLMISRTPEVTCVVVDVSHE
DPEVKFNWYVDGVEVHNAKTKPREEQYNSTYRVVSVLTVLHQDWLNGKEYKCKVSNKALPAP
IEKTISKAKGQPREPQVYTLPPSREEMTKNQVSLTCLVKGFYPSDIAVEWESNGQPENNYKT
TPPVLDSDGSFFLYSKLTVDKSRWQQGNVFSCSVMHEALHNHYTQKSLSLSPGKGGGGSGGG
GSGGGGSEVQLVESGGGLVQPGGSLRLSCAASGFNIKDTYIHWVRQAPGKGLEWVARIYPTN
GYTRYADSVKGRFTISADTSKNTAYLQMNSLRAEDTAVYYCSRWGGDGFYAMDYWGQGTLVT
VSSGGGGSGGGGSGGGGSDIQMTQSPSSLSASVGDRVTITCRASQDVNTAVAWYQQKPGKAP
KLLIYSASFLYSGVPSRFSGSRSGTDFTLTISSLQPEDFATYYCQQHYTTPPTFGQGTKVEI
K
SEQ ID NO: 176:
DASLPYLQKESVFQSGAHAYRIPALLYLPGQQSLLAFAEQRASKKDEHAELIVLRRGDYDAG
THQVQWQAQEVVAQARLDGHRSMNPCPLYDEQTGTLFLFFIAIPGQVTEQQQLQTRANVTRL
CQVTSTDHGRTWSSPRDLTDAAIGPAYREWSTFAVGPGHCLQLHDRARSLVVPAYAYRKLHP
KQRPIPSAFCFLSHDHGRTWARGHFVAQDTLECQVAEVETGEQRVVTLNARSHLRARVQAQS
TNDGLDFQESQLVKKLVEPPPQGCQGSVISFPSPRSGPGSPAQWLLYTHPTHARQRADLGAY
LNPRPPAPEAWSEPVLLAKGSAAYSDLQSMGTGPDGSPLFGCLYEANDYEEIVFLMFTLKQA
FPAEYLPQEPKSSDKTHTCPPCPAPELLGGPSVFLFPPKPKDTLMISRTPEVTCVVVDVSHE
DPEVKFNWYVDGVEVHNAKTKPREEQYNSTYRVVSVLTVLHQDWLNGKEYKCKVSNKALPAP
IEKTISKAKGQPREPQVYTLPPSREEMTKNQVSLTCLVKGFYPSDIAVEWESNGQPENNYKT
TPPVLDSDGSFFLYSKLTVDKSRWQQGNVFSCSVMHEALHNHYTQKSLSLSPGKGGGGSGGG
GSGGGGSEVQLVESGGGLVQPGGSLRLSCAASGFNIKDTYIHWVRQAPGKGLEWVARIYPTN
GYTRYADSVKGRFTISADTSKNTAYLQMNSLRAEDTAVYYCSRWGGDGFYAMDYWGQGTLVT
VSSGGGGSGGGGSGGGGSDIQMTQSPSSLSASVGDRVTITCRASQDVNTAVAWYQQKPGKAP
KLLIYSASFLYSGVPSRFSGSRSGTDFTLTISSLQPEDFATYYCQQHYTTPPTFGQGTKVEI
K
SEQ ID NO: 177:
DASLPYLQKESVFQSGAHAYRIPALLYLPGQQSLLAFAEQRASKKDEHAELIVLRRGDYDAG
THQVQWQAQEVVAQARLDGHRSMNPCPLYDEQTGTLFLFFIAIPGQVTEQQQLQTRANVTRL
CYVTSTDHGRTWSSPRDLTDAAIGPAYREWSTFAVGPGHCLQLHDRARSLVVPAYAYRKLHP
KQRPIPSAFCFLSHDHGRTWARGHFVAQDTLECQVAEVETGEQRVVTLNARSHLRARVQAQS
TNDGLDFQESQLVKKLVEPPPTGCQGSVISFPSPRSGPGSPAQWLLYTHPTHSWQRADLGAY
LNPRPPAPEAWSEPVLLAKGSAAYSDLQSMGTGPDGSPLFGCLYEANDYEEIVFLMFTLKQA
FPAEYLPQEPKSSDKTHTCPPCPAPELLGGPSVFLFPPKPKDTLMISRTPEVTCVVVDVSHE
DPEVKFNWYVDGVEVHNAKTKPREEQYNSTYRVVSVLTVLHQDWLNGKEYKCKVSNKALPAP
IEKTISKAKGQPREPQVYTLPPSREEMTKNQVSLTCLVKGFYPSDIAVEWESNGQPENNYKT
TPPVLDSDGSFFLYSKLTVDKSRWQQGNVFSCSVMHEALHNHYTQKSLSLSPGKGGGGSGGG
GSGGGGSEVQLVESGGGLVQPGGSLRLSCAASGFNIKDTYIHWVRQAPGKGLEWVARIYPTN
GYTRYADSVKGRFTISADTSKNTAYLQMNSLRAEDTAVYYCSRWGGDGFYAMDYWGQGTLVT
VSSGGGGSGGGGSGGGGSDIQMTQSPSSLSASVGDRVTITCRASQDVNTAVAWYQQKPGKAP
KLLIYSASFLYSGVPSRFSGSRSGTDFTLTISSLQPEDFATYYCQQHYTTPPTFGQGTKVEI
K
SEQ ID NO: 178:
DASLPYLQKESVFQSGAHAYRIPALLYLPGQQSLLAFAEQRASKKDEHAELIVLRRGDYDAG
THQVQWQAQEVVAQARLDGHRSMNPCPLYDEQTGTLFLFFIAIPGQVTEQQQLQTRANVTRL
CYVTSTDHGRTWSSPRDLTDAAIGPAYREWSTFAVGPGHCLQLHDRARSLVVPAYAYRKLHP
KQRPIPSAFCFLSHDHGRTWARGHFVAQDTLECQVAEVETGEQRVVTLNARSHLRFRVQAQS
TNDGLDFQESQLVKKLVEPPPTGCQGSVISFPSPRSGPGSPAQWLLYTHPTHSWQRADLGAY
LNPRPPAPEAWSEPVLLAKGSAAYSDLQSMGTGPDGSPLFGCLYEANDYEEIVFLMFTLKQA
FPAEYLPQEPKSSDKTHTCPPCPAPELLGGPSVFLFPPKPKDTLMISRTPEVTCVVVDVSHE
DPEVKFNWYVDGVEVHNAKTKPREEQYNSTYRVVSVLTVLHQDWLNGKEYKCKVSNKALPAP
IEKTISKAKGQPREPQVYTLPPSREEMTKNQVSLTCLVKGFYPSDIAVEWESNGQPENNYKT
TPPVLDSDGSFFLYSKLTVDKSRWQQGNVFSCSVMHEALHNHYTQKSLSLSPGKGGGGSGGG
GSGGGGSEVQLVESGGGLVQPGGSLRLSCAASGFNIKDTYIHWVRQAPGKGLEWVARIYPTN
GYTRYADSVKGRFTISADTSKNTAYLQMNSLRAEDTAVYYCSRWGGDGFYAMDYWGQGTLVT
VSSGGGGSGGGGSGGGGSDIQMTQSPSSLSASVGDRVTITCRASQDVNTAVAWYQQKPGKAP
KLLIYSASFLYSGVPSRFSGSRSGTDFTLTISSLQPEDFATYYCQQHYTTPPTFGQGTKVEI
K
SEQ ID NO: 179:
X₁ASLPX₂LQX₃ESVFQSGAHAYRIPALLYLPGQQSLLAFAEQRASKKDEHAELIVLRRGDYD
AX₄THQVQWQAQEVVAQARLDGHRSMNPCPLYDX₅QTGTLFLFFIAIPGQVTEQQQLQTRANV
TRLCX₆VTSTDHGRTWSSPRDLTDAAIGPAYREWSTFAVGPGHCLQLHDRARSLVVPAYAYR
KLHPX₇QRPIPSAFCFLSHDHGRTWARGHFVAQDTLECQVAEVETGEQRVVTLNARSHLRX₈R
VQAQSTNDGLDFQESQLVKKLVEPPPX₉GCQGSVISFPSPRSGPGSPAQWLLYTHPTHX₁₀X₁₁
QRADLGAYLNPRPPAPEAWSEPVLLAKGSX₁₂AYSDLQSMGTGPDGSPLFGCLYEANDYEEIX₁₃
FX₁₄MFTLKQAFPAEYLPQX₁₅DKTHTCPPCPAPELLGGPSVFLFPPKPKDTLMISRTPEVT
CVVVDVSHEDPEVKFNWYVDGVEVHNAKTKPREEQYNSTYRVVSVLTVLHQDWLNGKEYKCK
VSNKALPAPIEKTISKAKGQPREPQVYTLPPSREEMTKNQVSLTCLVKGFYPSDIAVEWESN
GQPENNYKTTPPVLDSDGSFFLYSKLTVDKSRWQQGNVFSCSVMHEALHNHYTQKSLSLSPG
KGGGGSGGGGSGGGGSEVQLVESGGGLVQPGGSLRLSCAASGFNIKDTYIHWVRQAPGKGLE
WVARIYPTNGYTRYADSVKGRFTISADTSKNTAYLQMNSLRAEDTAVYYCSRWGGDGFYAMD
YWGQGTLVTVSSGGGGSGGGGSGGGGSDIQMTQSPSSLSASVGDRVTITCRASQDVNTAVAW
YQQKPGKAPKLLIYSASFLYSGVPSRFSGSRSGTDFTLTISSLQPEDFATYYCQQHYTTPPT
FGQGTKVEIK
SEQ ID NO: 180:
X₁X₂SX₃X₄X₅LQX₆ESVFQSGAHAYRIPALLYLPGQQSLLAFAEQRASX₇X₈DEHAELIVX₉RR
GDYDAX₁₀THQVQWX₁₁AQEVVAQAX₁₂LX₁₃GHRSMNPCPLYDX₁₄QTGTLFLFFIAIPX₁₅X₁₆V
TEX₁₇QQLQTRANVTRLX₁₈X₁₉VTSTDHGRTWSSPRDLTDAAIGPX₂₀YREWSTFAVGPGHX₂₁
LQLHDX₂₂X₂₃RSLVVPAYAYRKLHPX₂₄X₂₅X₂₆PIPSAFX₂₇FLSHDHGRTWARGHFVX₂₈QDTX₂₉
ECQVAEVX₃₀TGEQRWTLNARSX₃₁X₃₂X₃₃X₃₄RX₃₅QAQSX₃₆NX₃₇GLDFQX₃₈X₃₉QX₄₀VKKL
X₄₁EPPPX₄₂GX₄₃QGSVISFPSPRSGPGSPAQX₄₄LLYTHPTHX₄₅X₄₆QRADLGAYLNPRPPAP
EAWSEPX₄₇LLAKGSX₄₈AYSDLQSMGTGPDGSPLFGX₄₉LYEANDYEEIX₅₀FX₅₁MFTLKQAF
PAEYLPQX₅₂DKTHTCPPCPAPELLGGPSVELEPPKPKDTLMISRTPEVTCVVVDVSHEDPEV
KFNWYVDGVEVHNAKTKPREEQYNSTYRVVSVLTVLHQDWLNGKEYKCKVSNKALPAPIEKT
ISKAKGQPREPQVYTLPPSREEMTKNQVSLTCLVKGFYPSDIAVEWESNGQPENNYKTTPPV
LDSDGSFFLYSKLTVDKSRWQQGNVFSCSVMHEALHNHYTQKSLSLSPGKGGGGSGGGGSGG
GGSEVQLVESGGGLVQPGGSLRLSCAASGFNIKDTYIHWVRQAPGKGLEWVARIYPTNGYTR
YADSVKGRFTISADTSKNTAYLQMNSLRAEDTAVYYCSRWGGDGFYAMDYWGQGTLVTVSSG
GGGSGGGGSGGGGSDIQMTQSPSSLSASVGDRVTITCRASQDVNTAVAWYQQKPGKAPKLLI
YSASFLYSGVPSRFSGSRSGTDFTLTISSLQPEDFATYYCQQHYTTPPTFGQGTKVEIK
SEQ ID NO: 181:
gatGCATCTCTGCCTTACCTGCAGAAAGAAAGCGTGTTCCAGTCTGGCGCCCACGCCTACAG
AATTCCCGCTCTGCTGTATCTGCCAGGCCAGCAGTCTCTGCTGGCTTTCGCTGAACAGCGGG
CCAGCAAGAAGGATGAGCACGCCGAACTGATCGTGCTGCGGAGAGGCGATTACGACGCCggc
ACACATCAGGTGCAGTGGCAGGCTCAAGAGGTGGTGGCTCAGGCTAGACTGGACGGCCACAG
ATCTATGAACCCCTGTCCTCTGTACGATgaaCAGACCGGCACACTGTTTCTGTTCTTTATCG
CTATCCCCGGCCAAGTGACCGAGCAGCAGCAGCTGCAGACAAGAGCCAACGTGACCAGACTG
TGTtacGTGACCTCCACCGACCACGGCAGAACCTGGTCTAGCCCTAGAGATCTGACCGACGC
CGCCATCGGACCTGCCTATAGAGAGTGGTCCACCTTCGCCGTTGGACCTGGACACTGTCTCC
AGCTGCACGACAGGGCTAGATCTCTGGTGGTGCCTGCCTACGCCTATAGAAAGCTGCACCCC
AAACAGCGGCCTATTCCTAGCGCCTTCTGCTTTCTGAGCCACGATCACGGCAGGACATGGGC
CAGAGGACATTTCGTGGCCCAGGACACACTGGAATGCCAGGTGGCCGAAGTGGAAACCGGCG
AGCAGAGAGTCGTGACCCTGAACGCCAGATCTCACCTGAGATTCAGAGTGCAGGCCCAGAGC
ACAAACGACGGCCTGGATTTCCAAGAGAGCCAGCTGGTCAAGAAACTGGTGGAACCTCCTCC
AaccGGCTGTCAGGGAAGCGTGATCAGCTTTCCATCTCCTAGAAGCGGCCCTGGCTCTCCTG
CTCAGTGGCTGCTGTATACACACCCCACACACAGCTGGCAGAGAGCCGATCTGGGCGCCTAC
CTGAATCCTAGACCTCCTGCTCCTGAGGCTTGGAGCGAACCTGTTCTGCTGGCCAAGGGCAG
CgctGCCTACAGCGATCTGCAGTCTATGGGCACAGGCCCTGATGGCAGCCCTCTGTTTGGCT
GTCTGTACGAGGCCAACGACTACGAAGAGATCGTGTTCCTGATGTTCACCCTGAAGCAGGCC
TTTCCAGCCGAGTACCTGCCTCAA
SEQ ID NO: 182:
X₁X₂SX₃X₄X₅LQX₆ESVFQSGAHAYRIPALLYLPGQQSLLAFAEQRASX₇X8DEHAELIVX₉RR
GDYDAX₁₀THQVQWX₁₁AQEVVAQAX₁₂LX₁₃GHRSMNPCPLYDX₁₄QTGTLFLFFIAIPX₁₅X₁₆V
TEX₁₇QQLQTRANVTRLX₁₈X₁₉VTSTDHGRTWSSPRDLTDAAIGPX₂₀YREWSTFAVGPGHX₂₁
LQLHDX₂₂X₂₃RSLVVPAYAYRKLHPX₂₄X₂₅X₂₆PIPSAFX₂₇FLSHDHGRTWARGHFVX₂₈QDTX₂₉
ECQVAEVX₃₀TGEQRVVTLNARSX₃₁X₃₂X₃₃X₃₄RX₃₅QAQSX₃₆NX₃₇GLDFQX₃₈X₃₉QX₄₀VKKL
X₄₁EPPPX₄₂GX₄₃QGSVISFPSPRSGPGSPAQX₄₄LLYTHPTHX₄₅X₄₆QRADLGAYLNPRPPAP
EAWSEPX₄₇LLAKGSX₄₈AYSDLQSMGTGPDGSPLFGX₄₉LYEANDYEEIX₅₀FX₅₁MFTLKQAF
PAEYLPQ
SEQ ID NO: 183:
X₁ASLPX₂LQX₃ESVFQSGAHAYRIPALLYLPGQQSLLAFAEQRASKKDEHAELIVLRRGDYD
AX₄THQVQWQAQEVVAQARLDGHRSMNPCPLYDX₅QTGTLFLFFIAIPGQVTEQQQLQTRANV
TRLCX₆VTSTDHGRTWSSPRDLTDAAIGPAYREWSTFAVGPGHCLQLHDRARSLVVPAYAYR
KLHPX₇QRPIPSAFCFLSHDHGRTWARGHFVAQDTLECQVAEVETGEORVVTLNARSHLRX₈R
VQAQSTNDGLDFQESQLVKKLVEPPPX₉GCQGSVISFPSPRSGPGSPAQWLLYTHPTHX₁₀X₁₁
QRADLGAYLNPRPPAPEAWSEPVLLAKGSX₁₂AYSDLQSMGTGPDGSPLFGCLYEANDYEEIX₁₃
FX₁₄MFTLKQAFPAEYLPQ
SEQ ID NO: 184:
GGGGS
SEQ ID NO: 185:
DASLPYLQKESVFQSGAHAYRIPALLYLPGQQSLLAFAEQRASKKDEHAELIVLRRGDYDAG
THQVQWQAQEVVAQARLDGHRSMNPCPLYDEQTGTLFLFFIAIPGQVTEQQQLQTRANVTRL
CYVTSTDHGRTWSSPRDLTDAAIGPAYREWSTFAVGPGHCLQLHDRARSLVVPAYAYRKLHP
KQRPIPSAFCFLSHDHGRTWARGHFVAQDTLECQVAEVETGEQRVVTLNARSHLRARVQAQS
TNDGLDFQESQLVKKLVEPPPTGCQGSVISFPSPRSGPGSPAQWLLYTHPTHSWQRADLGAY
LNPRPPAPEAWSEPVLLAKGSAAYSDLQSMGTGPDGSPLFGCLYEANDYEEIVFLMFTLKQA
FPAEYLPQEPKSSDKTHTCPPCPAPELLGGPSVFLFPPKPKDTLMISRTPEVTCVVVDVSHE
DPEVKFNWYVDGVEVHNAKTKPREEQYNSTYRVVSVLTVLHQDWLNGKEYKCKVSNKALPAP
IEKTISKAKGQPREPQVYTLPPSREEMTKNQVSLYCLVKGFYPSDIAVEWESNGQPENNYKT
TPPVLDSDGSFFLYSKLTVDKSRWQQGNVFSCSVMHEALHNHYTQKSLSLSPGK
SEQ ID NO: 186:
gatGCATCTCTGCCTTACCTGCAGAAAGAAAGCGTGTTCCAGTCTGGCGCCCACGCCTACAG
AATTCCCGCTCTGCTGTATCTGCCAGGCCAGCAGTCTCTGCTGGCTTTCGCTGAACAGCGGG
CCAGCAAGAAGGATGAGCACGCCGAACTGATCGTGCTGCGGAGAGGCGATTACGACGCCggc
ACACATCAGGTGCAGTGGCAGGCTCAAGAGGTGGTGGCTCAGGCTAGACTGGACGGCCACAG
ATCTATGAACCCCTGTCCTCTGTACGATgaaCAGACCGGCACACTGTTTCTGTTCTTTATCG
CTATCCCCGGCCAAGTGACCGAGCAGCAGCAGCTGCAGACAAGAGCCAACGTGACCAGACTG
TGTtacGTGACCTCCACCGACCACGGCAGAACCTGGTCTAGCCCTAGAGATCTGACCGACGC
CGCCATCGGACCTGCCTATAGAGAGTGGTCCACCTTCGCCGTTGGACCTGGACACTGTCTCC
AGCTGCACGACAGGGCTAGATCTCTGGTGGTGCCTGCCTACGCCTATAGAAAGCTGCACCCC
AAACAGCGGCCTATTCCTAGCGCCTTCTGCTTTCTGAGCCACGATCACGGCAGGACATGGGC
CAGAGGACATTTCGTGGCCCAGGACACACTGGAATGCCAGGTGGCCGAAGTGGAAACCGGCG
AGCAGAGAGTCGTGACCCTGAACGCCAGATCTCACCTGAGAGCCAGAGTGCAGGCCCAGAGC
ACAAACGACGGCCTGGATTTCCAAGAGAGCCAGCTGGTCAAGAAACTGGTGGAACCTCCTCC
AaccGGCTGTCAGGGAAGCGTGATCAGCTTTCCATCTCCTAGAAGCGGCCCTGGCTCTCCTG
CTCAGTGGCTGCTGTATACACACCCCACACACAGCTGGCAGAGAGCCGATCTGGGCGCCTAC
CTGAATCCTAGACCTCCTGCTCCTGAGGCTTGGAGCGAACCTGTTCTGCTGGCCAAGGGCAG
CgctGCCTACAGCGATCTGCAGTCTATGGGCACAGGCCCTGATGGCAGCCCTCTGTTTGGCT
GTCTGTACGAGGCCAACGACTACGAAGAGATCGTGTTCCTGATGTTCACCCTGAAGCAGGCC
TTTCCAGCCGAGTACCTGCCTCAAGAGCCCAAATCTTCTGACAAAACTCACACATGCCCACC
GTGCCCAGCACCTGAACTCCTGGGGGGACCGTCAGTCTTCCTCTTCCCCCCAAAACCCAAGG
ACACCCTCATGATCTCCCGGACCCCTGAGGTCACATGCGTGGTGGTGGACGTGAGCCACGAA
GACCCTGAGGTCAAGTTCAACTGGTACGTGGACGGCGTGGAGGTGCATAATGCCAAGACAAA
GCCGCGGGAGGAGCAGTACAACAGCACGTACCGTGTGGTCAGCGTCCTCACCGTCCTGCACC
AGGACTGGCTGAATGGCAAGGAGTACAAGTGCAAGGTCTCCAACAAAGCCCTCCCAGCCCCC
ATCGAGAAAACCATCTCCAAAGCCAAAGGGCAGCCCCGAGAACCACAGGTcTACACCCTGCC
CCCATCCCGGGAGGAGATGACCAAGAACCAGGTCAGCCTGtaCTGCCTGGTCAAAGGCTTCT
ATCCCAGCGACATCGCCGTGGAGTGGGAGAGCAATGGGCAGCCGGAGAACAACTACAAGACC
ACGCCTCCCGTGCTGGACTCCGACGGCTCCTTCTTCCTCtatAGCAAGCTCACCGTGGACAA
GAGCAGGTGGCAGCAGGGGAACGTCTTCTCATGCTCCGTGATGCATGAGGCTCTGCACAACC
ACTACACGCAGAAGAGCCTCTCCCTGTCTCCGGGTAAA
SEQ ID NO: 187:
DASLPYLQKESVFQSGAHAYRIPALLYLPGQQSLLAFAEQRASKKDEHAELIVLRRGDYDAG
THQVQWQAQEVVAQARLDGHRSMNPCPLYDEQTGTLFLFFIAIPGQVTEQQQLQTRANVTRL
CYVTSTDHGRTWSSPRDLTDAAIGPAYREWSTFAVGPGHCLQLHDRARSLVVPAYAYRKLHP
KQRPIPSAFCFLSHDHGRTWARGHFVAQDTLECQVAEVETGEQRVVTLNARSHLRFRVQAQS
TNDGLDFQESQLVKKLVEPPPTGCQGSVISFPSPRSGPGSPAQWLLYTHPTHSWQRADLGAY
LNPRPPAPEAWSEPVLLAKGSAAYSDLQSMGTGPDGSPLFGCLYEANDYEEIVFLMFTLKQA
FPAEYLPQEPKSSDKTHTCPPCPAPELLGGPSVFLFPPKPKDTLMISRTPEVTCVVVDVSHE
DPEVKFNWYVDGVEVHNAKTKPREEQYNSTYRVVSVLTVLHQDWLNGKEYKCKVSNKALPAP
IEKTISKAKGQPREPQVYTLPPSREEMTKNQVSLYCLVKGFYPSDIAVEWESNGQPENNYKT
TPPVLDSDGSFFLYSKLTVDKSRWQQGNVFSCSVMHEALHNHYTQKSLSLSPGK
SEQ ID NO: 188:
gatGCATCTCTGCCTTACCTGCAGAAAGAAAGCGTGTTCCAGTCTGGCGCCCACGCCTACAG
AATTCCCGCTCTGCTGTATCTGCCAGGCCAGCAGTCTCTGCTGGCTTTCGCTGAACAGCGGG
CCAGCAAGAAGGATGAGCACGCCGAACTGATCGTGCTGCGGAGAGGCGATTACGACGCCggc
ACACATCAGGTGCAGTGGCAGGCTCAAGAGGTGGTGGCTCAGGCTAGACTGGACGGCCACAG
ATCTATGAACCCCTGTCCTCTGTACGATgaaCAGACCGGCACACTGTTTCTGTTCTTTATCG
CTATCCCCGGCCAAGTGACCGAGCAGCAGCAGCTGCAGACAAGAGCCAACGTGACCAGACTG
TGTtacGTGACCTCCACCGACCACGGCAGAACCTGGTCTAGCCCTAGAGATCTGACCGACGC
CGCCATCGGACCTGCCTATAGAGAGTGGTCCACCTTCGCCGTTGGACCTGGACACTGTCTCC
AGCTGCACGACAGGGCTAGATCTCTGGTGGTGCCTGCCTACGCCTATAGAAAGCTGCACCCC
AAACAGCGGCCTATTCCTAGCGCCTTCTGCTTTCTGAGCCACGATCACGGCAGGACATGGGC
CAGAGGACATTTCGTGGCCCAGGACACACTGGAATGCCAGGTGGCCGAAGTGGAAACCGGCG
AGCAGAGAGTCGTGACCCTGAACGCCAGATCTCACCTGAGAttCAGAGTGCAGGCCCAGAGC
ACAAACGACGGCCTGGATTTCCAAGAGAGCCAGCTGGTCAAGAAACTGGTGGAACCTCCTCC
AaccGGCTGTCAGGGAAGCGTGATCAGCTTTCCATCTCCTAGAAGCGGCCCTGGCTCTCCTG
CTCAGTGGCTGCTGTATACACACCCCACACACAGCTGGCAGAGAGCCGATCTGGGCGCCTAC
CTGAATCCTAGACCTCCTGCTCCTGAGGCTTGGAGCGAACCTGTTCTGCTGGCCAAGGGCAG
CgctGCCTACAGCGATCTGCAGTCTATGGGCACAGGCCCTGATGGCAGCCCTCTGTTTGGCT
GTCTGTACGAGGCCAACGACTACGAAGAGATCGTGTTCCTGATGTTCACCCTGAAGCAGGCC
TTTCCAGCCGAGTACCTGCCTCAAGAGCCCAAATCTTCTGACAAAACTCACACATGCCCACC
GTGCCCAGCACCTGAACTCCTGGGGGGACCGTCAGTCTTCCTCTTCCCCCCAAAACCCAAGG
ACACCCTCATGATCTCCCGGACCCCTGAGGTCACATGCGTGGTGGTGGACGTGAGCCACGAA
GACCCTGAGGTCAAGTTCAACTGGTACGTGGACGGCGTGGAGGTGCATAATGCCAAGACAAA
GCCGCGGGAGGAGCAGTACAACAGCACGTACCGTGTGGTCAGCGTCCTCACCGTCCTGCACC
AGGACTGGCTGAATGGCAAGGAGTACAAGTGCAAGGTCTCCAACAAAGCCCTCCCAGCCCCC
ATCGAGAAAACCATCTCCAAAGCCAAAGGGCAGCCCCGAGAACCACAGGTcTACACCCTGCC
CCCATCCCGGGAGGAGATGACCAAGAACCAGGTCAGCCTGtaCTGCCTGGTCAAAGGCTTCT
ATCCCAGCGACATCGCCGTGGAGTGGGAGAGCAATGGGCAGCCGGAGAACAACTACAAGACC
ACGCCTCCCGTGCTGGACTCCGACGGCTCCTTCTTCCTCtatAGCAAGCTCACCGTGGACAA
GAGCAGGTGGCAGCAGGGGAACGTCTTCTCATGCTCCGTGATGCATGAGGCTCTGCACAACC
ACTACACGCAGAAGAGCCTCTCCCTGTCTCCGGGTAAA
SEQ ID NO: 189:
EVQLVESGGGLVQPGGSLRLSCAASGFNIKDTYIHWVRQAPGKGLEWVARIYPTNGYTRYAD
SVKGRFTISADTSKNTAYLQMNSLRAEDTAVYYCSRWGGDGFYAMDYWGQGTLVTVSSASTK
GPSVFPLAPSSKSTSGGTAALGCLVKDYFPEPVTVSWNSGALTSGVHTFPAVLQSSGLYSLS
SVVTVPSSSLGTQTYICNVNHKPSNTKVDKKVEPKSCDKTHTCPPCPAPELLGGPSVFLFPP
KPKDTLMISRTPEVTCVVVDVSHEDPEVKFNWYVDGVEVHNAKTKPREEQYNSTYRVVSVLT
VLHQDWLNGKEYKCKVSNKALPAPIEKTISKAKGQPREPQVYTLPPSREEMTKNQVSLTCLV
KGFYPSDIAVEWESNGQPENNYKTTPPVLDSDGSFFLTSKLTVDKSRWQQGNVFSCSVMHEA
LHNHYTQKSLSLSPGK
SEQ ID NO: 190:
GAGGTGCAGCTGGTTGAATCTGGCGGAGGACTGGTTCAGCCTGGCGGATCTCTGAGACTGTC
TTGTGCCGCCAGCGGCTTCAACATCAAGGACACCTACATCCACTGGGTCCGACAGGCCCCTG
GCAAAGGACTTGAATGGGTCGCCAGAATCTACCCCACCAACGGCTACACCAGATACGCCGAC
TCTGTGAAGGGCAGATTCACCATCAGCGCCGACACCAGCAAGAACACCGCCTACCTGCAGAT
GAACAGCCTGAGAGCCGAGGACACCGCCGTGTACTACTGTTCTAGATGGGGAGGCGACGGCT
TCTACGCCATGGATTATTGGGGCCAGGGCACCCTGGTCACCGTTTCTTCTGCtagcACCAAG
GGCCCATCcGTCTTCCCCCTGGCACCCTCCTCCAAGAGCACCTCTGGGGGCACAGCGGCCCT
GGGCTGCCTGGTCAAGGACTACTTCCCCGAACCGGTGACGGTGTCcTGGAACTCAGGCGCtC
TGACCAGCGGCGTGCACACCTTCCCGGCTGTCCTACAGTCCTCAGGACTCTACTCCCTCAGC
AGCGTGGTGACCGTGCCCTCCAGCAGCTTGGGCACCCAGACCTACATCTGCAACGTGAATCA
CAAGCCGAGCAACACCAAGGTGGAGAAGAAAGTTGAGCCCAAATCTTGTGAGAAAACTCACA
CATGCCCACCGTGCCCAGCACCTGAACTCCTGGGGGGACCGTCAGTCTTCCTCTTCCCCCCA
AAACCCAAGGACACCCTCATGATCTCCCGGACCCCTGAGGTCACATGCGTGGTGGTGGACGT
GAGCCACGAAGACCCTGAGGTCAAGTTCAACTGGTACGTGGACGGCGTGGAGGTGCATAATG
CCAAGACAAAGCCGCGGGAGGAGCAGTACAACAGCACGTACCGTGTGGTCAGCGTCCTCACC
GTCCTGCACCAGGACTGGCTGAATGGCAAGGAGTACAAGTGCAAGGTCTCCAACAAAGCCCT
CCCAGCCCCCATCGAGAAAACCATCTCCAAAGCCAAAGGGCAGCCCCGAGAACCACAGGTcT
ACACCCTGCCCCCATCCCGGGAGGAGATGACCAAGAACCAGGTCAGCCTGACCTGCCTGGTC
AAAGGCTTCTATCCCAGCGACATCGCCGTGGAGTGGGAGAGCAATGGGCAGCCGGAGAACAA
CTACAAGACCACGCCTCCCGTGCTGGACTCCGACGGCTCCTTCTTCCTCacTAGCAAGCTCA
CCGTGGACAAGAGCAGGTGGCAGCAGGGGAACGTCTTCTCATGCTCCGTGATGCATGAGGCT
CTGCACAACCACTACACGCAGAAGAGCCTCTCCCTGTCTCCGGGTAAA
SEQ ID NO: 191:
DASLPYLQKESVFQSGAHAYRIPALLYLPGQQSLLAFAEQRASKKDEHAELIVLRRGDYDAG
THQVQWQAQEVVAQARLDGHRSMNPCPLYDEQTGTLFLFFIAIPGQVTEQQQLQTRANVTRL
CYVTSTDHGRTWSSPRDLTDAAIGPAYREWSTFAVGPGHCLQLHDRARSLVVPAYAYRKLHP
KQRPIPSAFCFLSHDHGRTWARGHFVAQDTLECQVAEVETGEQRVVTLNARSHLRARVQAQS
TNDGLDFQESQLVKKLVEPPPQGCQGSVISFPSPRSGPGSPAQWLLYTHPTHSWQRADLGAY
LNPRPPAPEAWSEPVLLAKGSAAYSDLQSMGTGPDGSPLFGCLYEANDYEEIVFLMFTLKQA
FPAEYLPQ
SEQ ID NO: 192:
DASLPYLQKESVFQSGAHAYRIPALLYLPGQQSLLAFAEQRASKKDEHAELIVLRRGDYDAG
THQVQWQAQEVVAQARLDGHRSMNPCPLYDEQTGTLFLFFIAIPGQVTEQQQLQTRANVTRL
CYVTSTDHGRTWSSPRDLTDAAIGPAYREWSTFAVGPGHCLQLHDRARSLVVPAYAYRKLHP
KQRPIPSAFCFLSHDHGRTWARGHFVAQDTLECQVAEVETGEQRVVTLNARSHLRARVQAQS
TNDGLDFQESQLVKKLVEPPPQGCQGSVISFPSPRSGPGSPAQWLLYTHPTHSWQRADLGAY
LNPRPPAPEAWSEPVLLAKGSAAYSDLQSMGTGPDGSPLFGCLYEANDYEEIVFLMFTLKQA
FPAEYLPQEPKSSDKTHTCPPCPAPELLGGPSVFLFPPKPKDTLMISRTPEVTCVVVDVSHE
DPEVKFNWYVDGVEVHNAKTKPREEQYNSTYRVVSVLTVLHQDWLNGKEYKCKVSNKALPAP
IEKTISKAKGQPREPQVYTLPPSREEMTKNQVSLTCLVKGFYPSDIAVEWESNGQPENNYKT
TPPVLDSDGSFFLTSKLTVDKSRWQQGNVFSCSVMHEALHNHYTQKSLSLSPGK
SEQ ID NO: 193:
DASLPYLQKESVFQSGAHAYRIPALLYLPGQQSLLAFAEQRASKKDEHAELIVLRRGDYDAG
THQVQWQAQEVVAQARLDGHRSMNPCPLYDEQTGTLFLFFIAIPGQVTEQQQLQTRANVTRL
CYVTSTDHGRTWSSPRDLTDAAIGPAYREWSTFAVGPGHCLQLHDRARSLVVPAYAYRKLHP
KQRPIPSAFCFLSHDHGRTWARGHFVAQDTLECQVAEVETGEQRVVTLNARSHLRARVQAQS
TNDGLDFQESQLVKKLVEPPPQGCQGSVISFPSPRSGPGSPAQWLLYTHPTHSWQRADLGAY
LNPRPPAPEAWSEPVLLAKGSAAYSDLQSMGTGPDGSPLFGCLYEANDYEEIVFLMFTLKQA
FPAEYLPQEPKSSDKTHTCPPCPAPELLGGPSVFLFPPKPKDTLMISRTPEVTCVVVDVSHE
DPEVKFNWYVDGVEVHNAKTKPREEQYNSTYRVVSVLTVLHQDWLNGKEYKCKVSNKALPAP
IEKTISKAKGQPREPQVYTLPPSREEMTKNQVSLTCLVKGFYPSDIAVEWESNGQPENNYKT
TPPVLDSDGSFFLYSKLTVDKSRWQQGNVFSCSVMHEALHNHYTQKSLSLSPGK
SEQ ID NO: 194:
DASLPYLQKESVFQSGAHAYRIPALLYLPGQQSLLAFAEQRASKKDEHAELIVLRRGDYDAG
THQVQWQAQEVVAQARLDGHRSMNPCPLYDEQTGTLFLFFIAIPGQVTEQQQLQTRANVTRL
CYVTSTDHGRTWSSPRDLTDAAIGPAYREWSTFAVGPGHCLQLHDRARSLVVPAYAYRKLHP
KQRPIPSAFCFLSHDHGRTWARGHFVAQDTLECQVAEVETGEQRVVTLNARSHLRARVQAQS
TNDGLDFQESQLVKKLVEPPPQGCQGSVISFPSPRSGPGSPAQWLLYTHPTHSWQRADLGAY
LNPRPPAPEAWSEPVLLAKGSAAYSDLQSMGTGPDGSPLFGCLYEANDYEEIVFLMFTLKQA
FPAEYLPQEPKSSDKTHTCPPCPAPELLGGPSVFLFPPKPKDTLMISRTPEVTCVVVDVSHE
DPEVKFNWYVDGVEVHNAKTKPREEQYNSTYRVVSVLTVLHQDWLNGKEYKCKVSNKALPAP
IEKTISKAKGQPREPQVYTLPPSREEMTKNQVSLTCLVKGFYPSDIAVEWESNGQPENNYKT
TPPVLDSDGSFFLYSKLTVDKSRWQQGNVFSCSVMHEALHNHYTQKSLSLSPGKGGGGSGGG
GSGGGGSEVQLVESGGGLVQPGGSLRLSCAASGFNIKDTYIHWVRQAPGKGLEWVARIYPTN
GYTRYADSVKGRFTISADTSKNTAYLQMNSLRAEDTAVYYCSRWGGDGFYAMDYWGQGTLVT
VSSGGGGSGGGGSGGGGSDIQMTQSPSSLSASVGDRVTITCRASQDVNTAVAWYQQKPGKAP
KLLIYSASFLYSGVPSRFSGSRSGTDFTLTISSLQPEDFATYYCQQHYTTPPTFGQGTKVEI
K
SEQ ID NO: 195:
DASLPYLQKESVFQSGAHAYRIPALLYLPGQQSLLAFAEQRASKKDEHAELIVLRRGDYDAG
THQVQWQAQEVVAQARLDGHRSMNPCPLYDEQTGTLFLFFIAIPGQVTEQQQLQTRANVTRL
CYVTSTDHGRTWSSPRDLTDAAIGPAYREWSTFAVGPGHCLQLHDRARSLVVPAYAYRKLHP
KQRPIPSAFCELSHDHGRTWARGHEVAQDTLECQVAEVETGEQRVVTLNARSHLRARVQAQS
TNDGLDFQESQLVKKLVEPPPQGCQGSVISFPSPRSGPGSPAQWLLYTHPTHSWQRADLGAY
LNPRPPAPEAWSEPVLLAKGSAAYSDLQSMGTGPDGSPLFGCLYEANDYEEIVFLMFTLKQA
FPAEYLPQGGGGSGGGGSDKTHTCPPCPAPELLGGPSVFLFPPKPKDTLMISRTPEVTCVVV
DVSHEDPEVKFNWYVDGVEVHNAKTKPREEQYNSTYRVVSVLTVLHQDWLNGKEYKCKVSNK
ALPAPIEKTISKAKGQPREPQVYTLPPSREEMTKNQVSLTCLVKGFYPSDIAVEWESNGQPE
NNYKTTPPVLDSDGSFFLTSKLTVDKSRWQQGNVFSCSVMHEALHNHYTQKSLSLSPGK
SEQ ID NO: 196:
DASLPYLQKESVFQSGAHAYRIPALLYLPGQQSLLAFAEQRASKKDEHAELIVLRRGDYDAG
THQVQWQAQEVVAQARLDGHRSMNPCPLYDEQTGTLFLFFIAIPGQVTEQQQLQTRANVTRL
CYVTSTDHGRTWSSPRDLTDAAIGPAYREWSTFAVGPGHCLQLHDRARSLVVPAYAYRKLHP
KQRPIPSAFCFLSHDHGRTWARGHFVAQDTLECQVAEVETGEQRVVTLNARSHLRARVQAQS
TNDGLDFQESQLVKKLVEPPPQGCQGSVISFPSPRSGPGSPAQWLLYTHPTHSWQRADLGAY
LNPRPPAPEAWSEPVLLAKGSAAYSDLQSMGTGPDGSPLFGCLYEANDYEEIVFLMFTLKQA
FPAEYLPQGGGGSGGGGSDKTHTCPPCPAPELLGGPSVFLFPPKPKDTLMISRTPEVTCVVV
DVSHEDPEVKFNWYVDGVEVHNAKTKPREEQYNSTYRVVSVLTVLHQDWLNGKEYKCKVSNK
ALPAPIEKTISKAKGQPREPQVYTLPPSREEMTKNQVSLTCLVKGFYPSDIAVEWESNGQPE
NNYKTTPPVLDSDGSFFLYSKLTVDKSRWQQGNVFSCSVMHEALHNHYTQKSLSLSPGK
SEQ ID NO: 197:
DASLPYLQKESVFQSGAHAYRIPALLYLPGQQSLLAFAEQRASKKDEHAELIVLRRGDYDAG
THQVQWQAQEVVAQARLDGHRSMNPCPLYDEQTGTLFLFFIAIPGQVTEQQQLQTRANVTRL
CYVTSTDHGRTWSSPRDLTDAAIGPAYREWSTFAVGPGHCLQLHDRARSLVVPAYAYRKLHP
KQRPIPSAFCFLSHDHGRTWARGHFVAQDTLECQVAEVETGEQRVVTLNARSHLRARVQAQS
TNDGLDFQESQLVKKLVEPPPQGCQGSVISFPSPRSGPGSPAQWLLYTHPTHSWQRADLGAY
LNPRPPAPEAWSEPVLLAKGSAAYSDLQSMGTGPDGSPLFGCLYEANDYEEIVFLMFTLKQA
FPAEYLPQGGGGSGGGGSDKTHTCPPCPAPELLGGPSVFLFPPKPKDTLMISRTPEVTCVVV
DVSHEDPEVKFNWYVDGVEVHNAKTKPREEQYNSTYRVVSVLTVLHQDWLNGKEYKCKVSNK
ALPAPIEKTISKAKGQPREPQVYTLPPSREEMTKNQVSLTCLVKGFYPSDIAVEWESNGQPE
NNYKTTPPVLDSDGSFFLYSKLTVDKSRWQQGNVFSCSVMHEALHNHYTQKSLSLSPGKGGG
GSGGGGSGGGGSEVQLVESGGGLVQPGGSLRLSCAASGFNIKDTYIHWVRQAPGKGLEWVAR
IYPTNGYTRYADSVKGRFTISADTSKNTAYLQMNSLRAEDTAVYYCSRWGGDGFYAMDYWGQ
GTLVTVSSGGGGSGGGGSGGGGSDIQMTQSPSSLSASVGDRVTITCRASQDVNTAVAWYQQK
PGKAPKLLIYSASFLYSGVPSRFSGSRSGTDFTLTISSLQPEDFATYYCQQHYTTPPTFGQG
TKVEIK

What is claimed is:

1. A recombinant mutant human sialidase enzyme, wherein the sialidase comprises:
(a) a substitution of a proline residue at a position corresponding to position 5 of wild-type human Neu2 (P5);
(b) a substitution of a lysine residue at a position corresponding to position 9 of wild-type human Neu2 (K9);
(c) a substitution of a lysine residue at a position corresponding to position 44 of wild-type human Neu2 (K44);
(d) a substitution of a lysine residue at a position corresponding to position 45 of wild-type human Neu2 (K45);
(e) a substitution of a leucine residue at a position corresponding to position 54 of wild-type human Neu2 (L54);
(f) a substitution of a proline residue at a position corresponding to position 62 of wild-type human Neu2 (P62);
(g) a substitution of a glutamine residue at a position corresponding to position 69 of wild-type human Neu2 (Q69);
(h) a substitution of an arginine residue at a position corresponding to position 78 of wild-type human Neu2 (R78);
(i) a substitution of an aspartic acid residue at a position corresponding to position 80 of wild-type human Neu2 (D80);
(j) a substitution of an alanine residue at a position corresponding to position 93 of wild-type human Neu2 (A93);
(k) a substitution of a glycine residue at a position corresponding to position 107 of wild-type human Neu2 (G107);
(l) a substitution of a glutamine residue at a position corresponding to position 108 of wild-type human Neu2 (Q108);
(m) a substitution of a glutamine residue at a position corresponding to position 112 of wild-type human Neu2 (Q112);
(n) a substitution of a cysteine residue at a position corresponding to position 125 of wild-type human Neu2 (C125);
(o) a substitution of a glutamine residue at a position corresponding to position 126 of wild-type human Neu2 (Q126);
(p) a substitution of an alanine residue at a position corresponding to position 150 of wild-type human Neu2 (A150);
(q) a substitution of a cysteine residue at a position corresponding to position 164 of wild-type human Neu2 (C164);
(r) a substitution of an arginine residue at a position corresponding to position 170 of wild-type human Neu2 (R170);
(s) a substitution of an alanine residue at a position corresponding to position 171 of wild-type human Neu2 (A171);
(t) a substitution of a glutamine residue at a position corresponding to position 188 of wild-type human Neu2 (Q188);
(u) a substitution of an arginine residue at a position corresponding to position 189 of wild-type human Neu2 (R189);
(v) a substitution of an alanine residue at a position corresponding to position 213 of wild-type human Neu2 (A213);
(w) a substitution of a leucine residue at a position corresponding to position 217 of wild-type human Neu2 (L217);
(x) a substitution of a glutamic acid residue at a position corresponding to position 225 of wild-type human Neu2 (E225);
(y) a substitution of a histidine residue at a position corresponding to position 239 of wild-type human Neu2 (H239);
(z) a substitution of a leucine residue at a position corresponding to position 240 of wild-type human Neu2 (L240);
(aa) a substitution of an arginine residue at a position corresponding to position 241 of wild-type human Neu2 (R241);
(bb) a substitution of an alanine residue at a position corresponding to position 242 of wild-type human Neu2 (A242);
(cc) a substitution of a valine residue at a position corresponding to position 244 of wild-type human Neu2 (V244);
(dd) a substitution of a threonine residue at a position corresponding to position 249 of wild-type human Neu2 (T249);
(ee) a substitution of an aspartic acid residue at a position corresponding to position 251 of wild-type human Neu2 (D251);
(ff) a substitution of a glutamic acid residue at a position corresponding to position 257 of wild-type human Neu2 (E257);
(gg) a substitution of a serine residue at a position corresponding to position 258 of wild-type human Neu2 (S258);
(hh) a substitution of a leucine residue at a position corresponding to position 260 of wild-type human Neu2 (L260);
(ii) a substitution of a valine residue at a position corresponding to position 265 of wild-type human Neu2 (V265);
(jj) a substitution of a glutamine residue at a position corresponding to position 270 of wild-type human Neu2 (Q270);
(kk) a substitution of a tryptophan residue at a position corresponding to position 292 of wild-type human Neu2 (W292);
(ll) a substitution of a serine residue at a position corresponding to position 301 of wild-type human Neu2 (S301);
(mm) a substitution of a tryptophan residue at a position corresponding to position 302 of wild-type human Neu2 (W302);
(nn) a substitution of a valine residue at a position corresponding to position 363 of wild-type human Neu2 (V363); or
(oo) a substitution of a leucine residue at a position corresponding to position 365 of wild-type human Neu2 (L365);
or a combination of any of the foregoing substitutions.

2. The sialidase of claim 1, wherein the sialidase comprises:
(a) a substitution of a proline residue at a position corresponding to position 5 of wild-type human Neu2 (P5);
(b) a substitution of a lysine residue at a position corresponding to position 9 of wild-type human Neu2 (K9);
(c) a substitution of a lysine residue at a position corresponding to position 44 of wild-type human Neu2 (K44);
(d) a substitution of a lysine residue at a position corresponding to position 45 of wild-type human Neu2 (K45);
(e) a substitution of a leucine residue at a position corresponding to position 54 of wild-type human Neu2 (L54);
(f) a substitution of a proline residue at a position corresponding to position 62 of wild-type human Neu2 (P62);
(g) a substitution of a glutamine residue at a position corresponding to position 69 of wild-type human Neu2 (Q69);
(h) a substitution of an arginine residue at a position corresponding to position 78 of wild-type human Neu2 (R78);
(i) a substitution of an alanine residue at a position corresponding to position 93 of wild-type human Neu2 (A93);
(j) a substitution of a glycine residue at a position corresponding to position 107 of wild-type human Neu2 (G107);
(k) a substitution of a glutamine residue at a position corresponding to position 108 of wild-type human Neu2 (Q108);
(l) a substitution of a glutamine residue at a position corresponding to position 112 of wild-type human Neu2 (Q112);
(m) a substitution of a cysteine residue at a position corresponding to position 125 of wild-type human Neu2 (C125);
(n) a substitution of a glutamine residue at a position corresponding to position 126 of wild-type human Neu2 (Q126);
(o) a substitution of an alanine residue at a position corresponding to position 150 of wild-type human Neu2 (A150);
(p) a substitution of a cysteine residue at a position corresponding to position 164 of wild-type human Neu2 (C164);
(q) a substitution of an alanine residue at a position corresponding to position 171 of wild-type human Neu2 (A171);
(r) a substitution of a leucine residue at a position corresponding to position 217 of wild-type human Neu2 (L217);
(s) a substitution of a threonine residue at a position corresponding to position 249 of wild-type human Neu2 (T249);
(t) a substitution of an aspartic acid residue at a position corresponding to position 251 of wild-type human Neu2 (D251);
(u) a substitution of a glutamine residue at a position corresponding to position 270 of wild-type human Neu2 (Q270);
(v) a substitution of a tryptophan residue at a position corresponding to position 292 of wild-type human Neu2 (W292);
(w) a substitution of a serine residue at a position corresponding to position 301 of wild-type human Neu2 (S301);
(x) a substitution of a tryptophan residue at a position corresponding to position 302 of wild-type human Neu2 (W302);
(y) a substitution of a valine residue at a position corresponding to position 363 of wild-type human Neu2 (V363); or
(z) a substitution of a leucine residue at a position corresponding to position 365 of wild-type human Neu2 (L365);
or a combination of any of the foregoing substitutions.

3. The sialidase of claim 1 or 2, wherein the sialidase comprises a substitution of K9, P62, A93, Q216, A242, Q270, S301, W302, V363, or L365, or a combination of any of the foregoing substitutions.

4. The sialidase of any one of claims 1-3, wherein the sialidase comprises a substitution of K9, P62, A93, Q270, S301, W302, V363, or L365, or a combination of any of the foregoing substitutions.

5. The sialidase of any one of claims 1-4, wherein, in the sialidase:
(a) the proline residue at a position corresponding to position 5 of wild-type human Neu2 is substituted by histidine (P5H);
(b) the lysine residue at a position corresponding to position 9 of wild-type human Neu2 is substituted by aspartic acid (K9D);
(c) the lysine residue at a position corresponding to position 44 of wild-type human Neu2 is substituted by arginine (K44R) or glutamic acid (K44E);
(d) the lysine residue at a position corresponding to position 45 of wild-type human Neu2 is substituted by alanine (K45A), arginine (K45R), or glutamic acid (K45E);
(e) the leucine residue at a position corresponding to position 54 of wild-type human Neu2 is substituted by methionine (L54M);
(f) the proline residue at a position corresponding to position 62 of wild-type human Neu2 is substituted by asparagine (P62N), aspartic acid (P62D), histidine (P62H), glutamic acid (P62E), glycine (P62G), serine (P62S), or threonine (P62T);
(g) the glutamine residue at a position corresponding to position 69 of wild-type human Neu2 is substituted by histidine (Q69H);
(h) the arginine residue at a position corresponding to position 78 of wild-type human Neu2 is substituted by lysine (R78K);
(i) the aspartic acid residue at a position corresponding to position 80 of wild-type human Neu2 is substituted by proline (D8OP);
(j) the alanine residue at a position corresponding to position 93 of wild-type human Neu2 is substituted by glutamic acid (A93E) or lysine (A93K);
(k) the glycine residue at a position corresponding to position 107 of wild-type human Neu2 is substituted by aspartic acid (G107D);
(l) the glutamine residue at a position corresponding to position 108 of wild-type human Neu2 is substituted by histidine (Q108H);
(m) the glutamine residue at a position corresponding to position 112 of wild-type human Neu2 is substituted by arginine (Q112R) or lysine (Q112K);
(n) the cysteine residue at a position corresponding to position 125 of wild-type human Neu2 is substituted by leucine (C125L);
(o) the glutamine residue at a position corresponding to position 126 of wild-type human Neu2 is substituted by leucine (Q126L), glutamic acid (Q126E), phenylalanine (Q126F), histidine (Q126H), isoleucine (Q1261), or tyrosine (Q126Y);
(p) the alanine residue at a position corresponding to position 150 of wild-type human Neu2 is substituted by valine (A150V);
(q) the cysteine residue at a position corresponding to position 164 of wild-type human Neu2 is substituted by glycine (C164G);
(r) the arginine residue at a position corresponding to position 170 of wild-type human Neu2 is substituted by proline (R170P);
(s) the alanine residue at a position corresponding to position 171 of wild-type human Neu2 is substituted by glycine (A171G);
(t) the glutamine residue at a position corresponding to position 188 of wild-type human Neu2 is substituted by proline (Q188P);
(u) the arginine residue at a position corresponding to position 189 of wild-type human Neu2 is substituted by proline (R189P);
(v) the alanine residue at a position corresponding to position 213 of wild-type human Neu2 is substituted by cysteine (A213C), asparagine (A213N), serine (A213S) or threonine (A213 T);
(w) the leucine residue at a position corresponding to position 217 of wild-type human Neu2 is substituted by alanine (L217A) or valine (L217V);
(x) the threonine residue at a position corresponding to position 249 of wild-type human Neu2 is substituted by alanine (T249A);
(y) the aspartic acid residue at a position corresponding to position 251 of wild-type human Neu2 is substituted by glycine (D251G);
(z) the glutamic acid residue at a position corresponding to position 225 of wild-type human Neu2 is substituted by proline (E225P);
(aa) the histidine residue at a position corresponding to position 239 of wild-type human Neu2 is substituted by proline (H239P);
(bb) the leucine residue at a position corresponding to position 240 of wild-type human Neu2 is substituted by aspartic acid (L240D), asparagine (L240N), or tyrosine (L240Y);
(cc) the arginine residue at a position corresponding to position 241 of wild-type human Neu2 is substituted by alanine (R241A), aspartic acid (R241D), leucine (R241L), glutamine (R241Q). or tyrosine (R241Y);
(dd) the alanine residue at a position corresponding to position 242 of wild-type human Neu2 is substituted by cysteine (A242C), phenylalanine (A242F), glycine (A242G), histidine (A242H), isoleucine (A2421), lysine (A242K), leucine (A242L), methionine (A242M), asparagine (A242N), glutamine (A242Q), arginine (A242R), serine (A242S), valine (A242V), tryptophan (A242W), or tyrosine (A242Y);
(ee) the valine residue at a position corresponding to position 244 of wild-type human Neu2 is substituted by isoleucine (V244I) or proline (V244P);
(ff) the glutamic acid residue at a position corresponding to position 257 of wild-type human Neu2 is substituted by proline (E257P);
(gg) the serine residue at a position corresponding to position 258 is substituted by cysteine (S258C);
(hh) the leucine residue at a position corresponding to position 260 of wild-type human Neu2 is substituted by aspartic acid (L260D), phenylalanine (L260F), glutamine (L260Q), or threonine (L260T);
(ii) the valine residue at a position corresponding to position 265 of wild-type human Neu2 is substituted by phenylalanine (V265F);
(jj) the glutamine residue at a position corresponding to position 270 of wild-type human Neu2 is substituted by alanine (Q270A), histidine (Q270H), phenylalanine (Q270F), proline (Q270P), serine (Q270S), or threonine (Q270T);
(kk) the tryptophan residue at a position corresponding to position 292 of wild-type human Neu2 is substituted by arginine (W292R);
(ll) the serine residue at a position corresponding to position 301 of wild-type human Neu2 is substituted by alanine (S301A), aspartic acid (S301D), glutamic acid (S301E), phenylalanine (S301F), histidine (S301H), lysine (S301K), leucine (S301L), methionine (S301M), asparagine (S301N), proline (S301P), glutamine (S301Q), arginine (S301R), threonine (S301T), valine (S301V), tryptophan (S301W), or tyrosine (S301Y);
(mm) the tryptophan residue at a position corresponding to position 302 of wild-type human Neu2 is substituted by alanine (W302A), aspartic acid (W302D), phenylalanine (W302F), glycine (W302G), histidine (W302H), isoleucine (W302I), lysine (W302K), leucine (W302L), methionine (W302M), asparagine (W302N), proline (W302P), glutamine (W302Q), arginine (W302R), serine (W302S), threonine (W302T), valine (W302V), or tyrosine (W302Y);
(nn) the valine residue at a position corresponding to position 363 of wild-type human Neu2 is substituted by arginine (V363R); or
(oo) the leucine residue at a position corresponding to position 365 of wild-type human Neu2 is substituted by glutamine (L365Q), histidine (L365H), isoleucine (L365I), lysine (L365K) or serine (L365S);
or the sialidase comprises a combination of any of the foregoing substitutions.

6. The sialidase of any one of claims 1-5, wherein, in the sialidase:
(a) the proline residue at a position corresponding to position 5 of wild-type human Neu2 is substituted by histidine (P5H);
(b) the lysine residue at a position corresponding to position 9 of wild-type human Neu2 is substituted by aspartic acid (K9D);
(c) the lysine residue at a position corresponding to position 44 of wild-type human Neu2 is substituted by arginine (K44R) or glutamic acid (K44E);
(d) the lysine residue at a position corresponding to position 45 of wild-type human Neu2 is substituted by alanine (K45A), arginine (K45R), or glutamic acid (K45E);
(e) the leucine residue at a position corresponding to position 54 of wild-type human Neu2 is substituted by methionine (L54M);
(f) the proline residue at a position corresponding to position 62 of wild-type human Neu2 is substituted by asparagine (P62N), aspartic acid (P62D), histidine (P62H), glutamic acid (P62E), glycine (P62G), serine (P62S), or threonine (P62T);
(g) the glutamine residue at a position corresponding to position 69 of wild-type human Neu2 is substituted by histidine (Q69H);
(h) the arginine residue at a position corresponding to position 78 of wild-type human Neu2 is substituted by lysine (R78K);
(i) the alanine residue at a position corresponding to position 93 of wild-type human Neu2 is substituted by glutamic acid (A93E) or lysine (A93K);
(j) the glycine residue at a position corresponding to position 107 of wild-type human Neu2 is substituted by aspartic acid (G107D);
(k) the glutamine residue at a position corresponding to position 108 of wild-type human Neu2 is substituted by histidine (Q108H);
(l) the glutamine residue at a position corresponding to position 112 of wild-type human Neu2 is substituted by arginine (Q112R) or lysine (Q112K);
(m) the cysteine residue at a position corresponding to position 125 of wild-type human Neu2 is substituted by leucine (C125L);
(n) the glutamine residue at a position corresponding to position 126 of wild-type human Neu2 is substituted by leucine (Q126L);
(o) the alanine residue at a position corresponding to position 150 of wild-type human Neu2 is substituted by valine (A150V);
(p) the cysteine residue at a position corresponding to position 164 of wild-type human Neu2 is substituted by glycine (C164G);
(q) the alanine residue at a position corresponding to position 171 of wild-type human Neu2 is substituted by glycine (A171G);
(r) the leucine residue at a position corresponding to position 217 of wild-type human Neu2 is substituted by alanine (L217A) or valine (L217V);
(s) the threonine residue at a position corresponding to position 249 of wild-type human Neu2 is substituted by alanine (T249A);
(t) the aspartic acid residue at a position corresponding to position 251 of wild-type human Neu2 is substituted by glycine (D251G);
(u) the glutamine residue at a position corresponding to position 270 of wild-type human Neu2 is substituted by alanine (Q270A), histidine (Q270H), phenylalanine (Q270F) or proline (Q270P);
(v) the tryptophan residue at a position corresponding to position 292 of wild-type human Neu2 is substituted by arginine (W292R);
(w) the serine residue at a position corresponding to position 301 of wild-type human Neu2 is substituted by arginine (S301R);
(x) the tryptophan residue at a position corresponding to position 302 of wild-type human Neu2 is substituted by lysine (W302K);
(y) the valine residue at a position corresponding to position 363 of wild-type human Neu2 is substituted by arginine (V363R); or
(z) the leucine residue at a position corresponding to position 365 of wild-type human Neu2 is substituted by glutamine (L365Q), histidine (L365H), isoleucine (L365I), lysine (L365K) or serine (L365S);
or the sialidase comprises a combination of any of the foregoing substitutions.

7. The sialidase of any one of claims 1-6, wherein the sialidase comprises a substitution selected from K9D, P62G, P62N, P62S, P62T, A93E, Q126Y, A242F, A242W, A242Y, Q270A, Q270T, S301A, S301R, W302K, W302R, V363R, and L365I, or a combination of any of the foregoing substitutions.

8. The sialidase of any one of claims 1-7, wherein the sialidase comprises a substitution selected from K9D, P62G, P62N, P62S, P62T, A93E, Q270A, S301R, W302K, V363R, and L365I substitutions, or a combination of any of the foregoing substitutions.

9. The sialidase of any one of claims 1-8, wherein the sialidase further comprises:
(a) a substitution or deletion of a methionine residue at a position corresponding to position 1 of wild-type human Neu2 (M1);
(b) a substitution of a valine residue at a position corresponding to position 6 of wild-type human Neu2 (V6);
(c) a substitution of an isoleucine residue at a position corresponding to position 187 of wild-type human Neu2 (I187); or
(d) a substitution of a cysteine residue at a position corresponding to position 332 of wild-type human Neu2 (C332);
or a combination of any of the foregoing substitutions.

10. The sialidase of claim 9, wherein, in the sialidase:
(a) the methionine residue at a position corresponding to position 1 of wild-type human Neu2 is deleted (ΔM1), is substituted by alanine (M1A), or is substituted by aspartic acid (M1D);
(b) the valine residue at a position corresponding to position 6 of wild-type human Neu2 is substituted by tyrosine (V6Y);
(c) the isoleucine residue at a position corresponding to position 187 of wild-type human Neu2 is substituted by lysine (I187K); or
(d) the cysteine residue at a position corresponding to position 332 of wild-type human Neu2 is substituted by alanine (C332A);
or the sialidase comprises a combination of any of the foregoing substitutions.

11. The sialidase of claim 10, wherein the sialidase comprises:
(a) the M1D, V6Y, P62G, A93E, I187K, and C332A substitutions;
(b) the M1D, V6Y, K9D, A93E, I187K, C332A, V363R, and L3651 substitutions;
(c) the M1D, V6Y, P62N, I187K, and C332A substitutions;
(d) the M1D, V6Y, I187K, Q270A, S301R, W302K, and C332A substitutions;
(e) the M1D, V6Y, P62S, I187K, Q270A, S301R, W302K, and C332A substitutions;
(f) the M1D, V6Y, P62T, I187K, Q270A, S301R, W302K, and C332A substitutions;
(g) the M1D, V6Y, P62N, I187K, Q270A, S301R, W302K, and C332A substitutions;
(h) the M1D, V6Y, P62G, A93E, I187K, S301A, W302R, and C332A substitutions;
(i) the M1D, V6Y, P62G, A93E, Q126Y, I187K, Q270T, and C332A substitutions;
(j) the M1D, V6Y, P62G, A93E, Q126Y, I187K, and C332A substitutions; or
(k) the M1D, V6Y, P62G, A93E, Q126Y, I187K, A242F, Q270T, and C332A substitutions.

12. The sialidase of claim 10, wherein the sialidase comprises:
(a) the M1D, V6Y, P62G, A93E, I187K, and C332A substitutions;
(b) the M1D, V6Y, K9D, A93E, I187K, C332A, V363R, and L365I substitutions;
(c) the M1D, V6Y, P62N, I187K, and C332A substitutions;
(d) the M1D, V6Y, I187K, Q270A, S301R, W302K, and C332A substitutions;
(e) the M1D, V6Y, P62S, I187K, Q270A, S301R, W302K, and C332A substitutions;
(f) the M1D, V6Y, P62T, I187K, Q270A, S301R, W302K, and C332A substitutions; or
(g) the M1D, V6Y, P62N, I187K, Q270A, S301R, W302K, and C332A substitutions.

13. The sialidase of any one of claims 1-12, wherein the sialidase is selected from Neu1, Neu2, Neu3, and Neu4.

14. The sialidase of claim 13, wherein the sialidase is Neu2.

15. The sialidase of any one of claims 1-14, wherein the sialidase has a different substrate specificity than the corresponding wild-type sialidase.

16. The sialidase of claim 15, wherein the sialidase can cleave α2,3, α2,6, and/or α2,8 linkages.

17. The sialidase of claim 15 or 16, wherein the sialidase can cleave α2,3 and α2,8 linkages.

18. The sialidase of any one of claims 1-17, wherein the sialidase comprises any one of SEQ ID NOs: 48-54, 149, 154, 159, or 191.

19. The sialidase of any one of claims 1-17, wherein the sialidase comprises any one of SEQ ID NOs: 48-54.

20. A recombinant mutant human sialidase comprising a mutation or combination of mutations set forth in any one of Tables 5-9, 11-13, or 15-30, optionally further comprising a mutation or combination of mutations set forth in any one of Tables 1-4.

21. A fusion protein comprising:
(a) the recombinant mutant human sialidase of any one of claims 1-20; and
(b) an immunoglobulin Fc domain and/or an immunoglobulin antigen-binding domain;
wherein the sialidase and the immunoglobulin Fc domain and/or the immunoglobulin antigen-binding domain are linked by a peptide bond or an amino acid linker.

22. The fusion protein of claim 21, wherein the fusion protein comprises an immunoglobulin Fc domain.

23. The fusion protein of claim 22, wherein the immunoglobulin Fc domain is derived from a human IgG1, IgG2, IgG3, IgG4, IgA1, IgA2, IgD, IgE, or IgM Fc domain.

24. The fusion protein of claim 23, wherein the immunoglobulin Fc domain is derived from a human IgG1, IgG2, IgG3, or IgG4 Fc domain.

25. The fusion protein of claim 24, wherein the immunoglobulin Fc domain is derived from a human IgG1 Fc domain.

26. The fusion protein of any one of claims 21-25, wherein the fusion protein comprises an immunoglobulin antigen-binding domain.

27. The fusion protein of claim 26, wherein the immunoglobulin antigen-binding domain is associated with a second immunoglobulin antigen-binding domain to produce an antigen-binding site.

28. The fusion protein of claim 26 or 27, wherein the immunoglobulin antigen-binding domain is derived from an antibody selected from trastuzumab, daratumumab, girentuximab, ofatumumab, avelumab, and rituximab.

29. An antibody conjugate comprising the fusion protein of any one of claims 21-28.

30. The antibody conjugate of claim 29, wherein the antibody conjugate comprises a single sialidase.

31. The antibody conjugate of claim 30, wherein the antibody conjugate comprises two sialidases.

32. The antibody conjugate of claim 31, wherein the two sialidases are identical.

33. The antibody conjugate of any one of claims 29-32, wherein the antibody conjugate comprises a single antigen-binding site.

34. The antibody conjugate of any one of claims 29-33, wherein the antibody conjugate comprises two antigen-binding sites.

35. The antibody conjugate of claim 34, wherein the two antigen-binding sites are identical.

36. The antibody conjugate of any one of claims 29-35, wherein the antibody conjugate has a molecular weight from about 135 kDa to about 165 kDa.

37. The antibody conjugate of any one of claims 29-35, wherein the antibody conjugate has a molecular weight from about 215 kDa to about 245 kDa.

38. The antibody conjugate of any one of claims 29-37, wherein the antibody conjugate comprises:
(a) a first polypeptide comprising an immunoglobulin light chain;
(b) a second polypeptide comprising an immunoglobulin heavy chain; and
(c) a third polypeptide comprising an immunoglobulin Fc domain and a sialidase;
wherein the first and second polypeptides are covalently linked together and the second and third polypeptides are linked together, and wherein the first polypeptide and the second polypeptide together define an antigen-binding site.

39. The antibody conjugate of claim 38, wherein the third polypeptide comprises the sialidase and the immunoglobulin Fc domain in an N- to C-terminal orientation.

40. The antibody conjugate of any one of claims 29-37, wherein the fusion protein comprises:
(a) a first polypeptide comprising a first immunoglobulin light chain;
(b) a second polypeptide comprising a first immunoglobulin heavy chain and a first sialidase;
(c) a third polypeptide comprising a second immunoglobulin heavy chain and a second sialidase; and
(d) a fourth polypeptide comprising a second immunoglobulin light chain; wherein the first and second polypeptides are covalently linked together, the third and fourth polypeptides are covalently linked together, and the second and third polypeptides are covalently linked together, and wherein the first polypeptide and the second polypeptide together define a first antigen-binding site, and the third polypeptide and the fourth polypeptide together define a second antigen-binding site.

41. The antibody conjugate of claim 40, wherein the second and third polypeptides comprise the first and second immunoglobulin heavy chain and the first and second sialidase, respectively, in an N- to C-terminal orientation.

42. The antibody conjugate of any one of claims 29-37, wherein the fusion protein comprises:
(a) a first polypeptide comprising a first sialidase, a first immunoglobulin Fc domain, and a first single chain variable fragment (scFv); and
(b) a second polypeptide comprising a second sialidase, a second immunoglobulin Fc domain, and a second single chain variable fragment (scFv);
wherein the first and second polypeptides are covalently linked together, and
wherein the first scFv defines a first antigen-binding site, and the second scFv defines a second antigen-binding site.

43. The antibody conjugate of claim 42, wherein the first polypeptide comprises the first sialidase, the first immunoglobulin Fc domain, and the first scFv in an N- to C-terminal orientation, and the second polypeptide comprises the second sialidase, the second immunoglobulin Fc domain, and the second scFv in an N- to C-terminal orientation.

44. The antibody conjugate of any one of claims 29-37, wherein the antibody conjugate comprises:
(a) a first polypeptide comprising an immunoglobulin light chain;
(b) a second polypeptide comprising an immunoglobulin heavy chain and a single chain variable fragment (scFv); and
(c) a third polypeptide comprising an immunoglobulin Fc domain and a sialidase;
wherein the first and second polypeptides are covalently linked together and the second and third polypeptides are covalently linked together, and wherein the immunoglobulin light chain and immunoglobulin heavy chain together define a first antigen-binding site and the scFv defines a second antigen-binding site.

45. The antibody conjugate of claim 44, wherein the second polypeptide comprises the immunoglobulin heavy chain and the scFv in an N- to C-terminal orientation, and the third polypeptide comprises the sialidase and the immunoglobulin Fc domain in an N- to C-terminal orientation.

46. An isolated nucleic acid comprising a nucleotide sequence encoding the recombinant mutant human sialidase of any one of claims 1-20, the fusion protein of any one of claims 21-28, or at least a portion of the antibody conjugate of any one of claims 29-45.

47. An expression vector comprising the nucleic acid of claim 46.

48. A host cell comprising the expression vector of claim 47.

49. A pharmaceutical composition comprising the recombinant mutant human sialidase of any one of claims 1-20, the fusion protein of any one of claims 21-28, or the antibody conjugate of any one of claims 29-45.

50. A method of treating cancer in a subject in need thereof, the method comprising administering to the subject an effective amount of the recombinant mutant human sialidase of any one of claims 1-20, the fusion protein of any one of claims 21-28, the antibody conjugate of any one of claims 29-45, or the pharmaceutical composition of claim 49.

51. The method of claim 50, wherein the cancer is a solid tumor, soft tissue tumor, hematopoietic tumor or metastatic lesion.

52. The method of claim 51, wherein the solid tumor is a sarcoma, adenocarcinoma, or carcinoma.

53. The method of claim 51 or 52, wherein the solid tumor is a head and neck (e.g., pharynx), thyroid, lung (e.g., small cell or non-small cell lung carcinoma (NSCLC)), breast, lymphoid, gastrointestinal (e.g., oral, esophageal, stomach, liver, pancreas, small intestine, colon and rectum, anal canal), genital or genitourinary tract (e.g., renal, urothelial, bladder, ovarian, uterine, cervical, endometrial, prostate, testicular), CNS (e.g., neural or glial cell, e.g., neuroblastoma or glioma), or skin (e.g., melanoma) tumor.

54. The method of claim 51, wherein the hematopoietic tumor is a leukemia, acute leukemia, acute lymphoblastic leukemia (ALL), B-cell, T-cell or FAB ALL, acute myeloid leukemia (AML), chronic myelocytic leukemia (CML), chronic lymphocytic leukemia (CLL), e.g., transformed CLL, diffuse large B-cell lymphoma (DLBCL), follicular lymphoma, hairy cell leukemia, myelodyplastic syndrome (MDS), lymphoma, Hodgkin's disease, malignant lymphoma, non-Hodgkin's lymphoma, Burkitt's lymphoma, multiple myeloma, or Richter's Syndrome (Richter's Transformation).

The application's sequence listing, which the Patent Office published only in electronic form, follows.

SEQUENCE LISTING (214 sequences)

SEQ ID NO: 1 - protein, 380 aa, Homo sapiens
MASLPVLQKESVFQSGAHAYRIPALLYLPGQQSLLAFAEQRASKKDEHAELIVLRRGDYDAPTHQVQWQAQEVVAQARLDGHRSMNPCPLYDAQTGTLFLFFIAIPGQVTEQQQLQTRANVTRLCQVTSTDHGRTWSSPRDLTDAAIGPAYREWSTFAVGPGHCLQLHDRARSLVVPAYAYRKLHPIQRPIPSAFCFLSHDHGRTWARGHFVAQDTLECQVAEVETGEQRVVTLNARSHLRARVQAQSTNDGLDFQESQLVKKLVEPPPQGCQGSVISFPSPRSGPGSPAQWLLYTHPTHSWQRADLGAYLNPRPPAPEAWSEPVLLAKGSCAYSDLQSMGTGPDGSPLFGCLYEANDYEEIVFLMFTLKQAFPAEYLPQ

SEQ ID NO: 2 - protein, 385 aa, Mus musculus
MEDLRPMATCPVLQKETLFRTGVHAYRIPALLYLKKQKTLLAFAEKRASKTDEHAELIVLRRGSYNEATNRVKWQPEEVVTQAQLEGHRSMNPCPLYDKQTKTLFLFFIAVPGRVSEHHQLHTKVNVTRLCCVSSTDHGRTWSPIQDLTETTIGSTHQEWATFAVGPGHCLQLRNPAGSLLVPAYAYRKLHPAQKPTPFAFCFISLDHGHTWKLGNFVAENSLECQVAEVGTGAQRMVYLNARSFLGARVQAQSPNDGLDFQDNRVVSKLVEPPHGCHGSVVAFHNPISKPHALDTWLLYTHPTDSRNRTNLGVYLNQMPLDPTAWSEPTLLAMGICAYSDLQNMGQGPDGSPQFGCLYESGNYEEIIFLIFTLKQAFPTVFDAQ

SEQ ID NO: 3 - protein, 5 aa, Mus musculus
EDLRP

SEQ ID NO: 4 - protein, 6 aa, Mus musculus
MEDLRP

SEQ ID NO: 5 - protein, 227 aa, Artificial Sequence
  Description of Artificial Sequence: Synthetic polypeptide
DKTHTCPPCPAPELLGGPSVFLFPPKPKDTLMISRTPEVTCVVVDVSHEDPEVKFNWYVDGVEVHNAKTKPREEQYNSTYRVVSVLTVLHQDWLNGKEYKCKVSNKALPAPIEKTISKAKGQPREPQVYTLPPSREEMTKNQVSLTCLVKGFYPSDIAVEWESNGQPENNYKTTPPVLDSDGSFFLYSKLTVDKSRWQQGNVFSCSVMHEALHNHYTQKSLSLSPGK

SEQ ID NO: 6 - DNA, 1143 bp, Salmonella typhimurium
acagtggaaaagtccgtggtgttcaaggccgagggcgagcacttcaccgaccagaaaggcaataccatcgtcggctctggcagcggcggcaccaccaagtactttagaatccccgccatgtgcaccaccagcaagggcaccattgtggtgttcgccgacgccagacacaacaccgccagcgatcagagcttcatcgataccgctgccgccagatctaccgatggcggcaagacctggaacaagaagatcgccatctacaacgaccgcgtgaacagcaagctgagcagagtgatggaccctacctgcatcgtggccaacatccagggcagagaaaccatcctggtcatggtcggaaagtggaacaacaacgataagacctggggcgcctacagagacaaggcccctgataccgattgggacctcgtgctgtacaagagcaccgatgacggcgtgaccttcagcaaggtggaaacaaacatccacgacatcgtgaccaagaacggcaccatctctgccatgctcggcggcgttggatctggcctgcaactgaatgatggcaagctggtgttccccgtgcagatggtccgaacaaagaatatcaccaccgtgctgaataccagcttcatctacagcaccgacggcatcacatggtccctgcctagcggctactgtgaaggctttggcagcgagaacaacatcatcgagttcaacgccagcctggtcaacaacatccggaacagcggcctgcggagaagcttcgagacaaaggacttcggaaagacgtggaccgagtttcctccaatggacaagaaggtggacaaccggaaccacggcgtgcagggcagcacaatcacaatccctagcggcaacaaactggtggccgctcactctagcgcccagaacaagaacaacgactacaccagaagcgacatcagcctgtacgcccacaacctgtacagcggcgaagtgaagctgatcgacgacttctaccccaaagtgggcaatgccagcggagccggctacagctgtctgagctaccggaaaaatgtggacaaagaaaccctgtacgtggtgtacgaggccaacggcagcatcgagtttcaggacctgagcagacatctgcccgtgatcaagagctacaac

SEQ ID NO: 7 - protein, 364 aa, Homo sapiens
ENDFGLVQPLVTMEQLLWVSGRQIGSVDTFRIPLITATPRGTLLAFAEARKMSSSDEGAKFIALRRSMDQGSTWSPTAFIVNDGDVPDGLNLGAVVSDVETGVVFLFYSLCAHKAGCQVASTMLVWSKDDGVSWSTPRNLSLDIGTEVFAPGPGSGIQKQREPRKGRLIVCGHGTLERDGVFCLLSDDHGASWRYGSGVSGIPYGQPKQENDFNPDECQPYELPDGSVVINARNQNNYHCHCRIVLRSYDACDTLRPRDVTFDPELVDPVVAAGAVVTSSGIVFFSNPAHPEFRVNLTLRWSFSNGTSWRKETVQLWPGPSGYSSLATLEGSMDGEEQAPQLYVLYEKGRNHYTESISVAKISV

SEQ ID NO: 8 - protein, 428 aa, Homo sapiens
MEEVTTCSFNSPLFRQEDDRGITYRIPALLYIPPTHTFLAFAEKRSTRRDEDALHLVLRRGLRIGQLVQWGPLKPLMEATLPGHRTMNPCPVWEQKSGCVFLFFICVRGHVTERQQIVSGRNAARLCFIYSQDAGCSWSEVRDLTEEVIGSELKHWATFAVGPGHGIQLQSGRLVIPAYTYYIPSWFFCFQLPCKTRPHSLMIYSDDLGVTWHHGRLIRPMVTVECEVAEVTGRAGHPVLYCSARTPNRCRAEALSTDHGEGFQRLALSRQLCEPPHGCQGSVVSFRPLEIPHRCQDSSSKDAPTIQQSSPGSSLRLEEEAGTPSESWLLYSHPTSRKQRVDLGIYLNQTPLEAACWSRPWILHCGPCGYSDLAALEEEGLFGCLFECGTKQECEQIAFRLFTHREILSHLQGDCTSPGRNPSQFKSN

SEQ ID NO: 9 - protein, 461 aa, Homo sapiens
MRPADLPPRPMEESPASSSAPTETEEPGSSAEVMEEVTTCSFNSPLFRQEDDRGITYRIPALLYIPPTHTFLAFAEKRSTRRDEDALHLVLRRGLRIGQLVQWGPLKPLMEATLPGHRTMNPCPVWEQKSGCVFLFFICVRGHVTERQQIVSGRNAARLCFIYSQDAGCSWSEVRDLTEEVIGSELKHWATFAVGPGHGIQLQSGRLVIPAYTYYIPSWFFCFQLPCKTRPHSLMIYSDDLGVTWHHGRLIRPMVTVECEVAEVTGRAGHPVLYCSARTPNRCRAEALSTDHGEGFQRLALSRQLCEPPHGCQGSVVSFRPLEIPHRCQDSSSKDAPTIQQSSPGSSLRLEEEAGTPSESWLLYSHPTSRKQRVDLGIYLNQTPLEAACWSRPWILHCGPCGYSDLAALEEEGLFGCLFECGTKQECEQIAFRLFTHREILSHLQGDCTSPGRNPSQFKSN

SEQ ID NO: 10 - protein, 484 aa, Homo sapiens
MGVPRTPSRTVLFERERTGLTYRVPSLLPVPPGPTLLAFVEQRLSPDDSHAHRLVLRRGTLAGGSVRWGALHVLGTAALAEHRSMNPCPVHDAGTGTVFLFFIAVLGHTPEAVQIATGRNAARLCCVASRDAGLSWGSARDLTEEAIGGAVQDWATFAVGPGHGVQLPSGRLLVPAYTYRVDRRECFGKICRTSPHSFAFYSDDHGRTWRCGGLVPNLRSGECQLAAVDGGQAGSFLYCNARSPLGSRVQALSTDEGTSFLPAERVASLPETAWGCQGSIVGFPAPAPNRPRDDSWSVGPGSPLQPPLLGPGVHEPPEEAAVDPRGGQVPGGPFSRLQPRGDGPRQPGPRPGVSGDVGSWTLALPMPFAAPPQSPTWLLYSHPVGRRARLHMGIRLSQSPLDPRSWTEPWVIYEGPSGYSDLASIGPAPEGGLVFACLYESGARTSYDEISFCTFSLREVLENVPASPKPPNLGDKPRGCCWPS

SEQ ID NO: 11 - protein, 496 aa, Homo sapiens
MMSSAAFPRWLSMGVPRTPSRTVLFERERTGLTYRVPSLLPVPPGPTLLAFVEQRLSPDDSHAHRLVLRRGTLAGGSVRWGALHVLGTAALAEHRSMNPCPVHDAGTGTVFLFFIAVLGHTPEAVQIATGRNAARLCCVASRDAGLSWGSARDLTEEAIGGAVQDWATFAVGPGHGVQLPSGRLLVPAYTYRVDRRECFGKICRTSPHSFAFYSDDHGRTWRCGGLVPNLRSGECQLAAVDGGQAGSFLYCNARSPLGSRVQALSTDEGTSFLPAERVASLPETAWGCQGSIVGFPAPAPNRPRDDSWSVGPGSPLQPPLLGPGVHEPPEEAAVDPRGGQVPGGPFSRLQPRGDGPRQPGPRPGVSGDVGSWTLALPMPFAAPPQSPTWLLYSHPVGRRARLHMGIRLSQSPLDPRSWTEPWVIYEGPSGYSDLASIGPAPEGGLVFACLYESGARTSYDEISFCTFSLREVLENVPASPKPPNLGDKPRGCCWPS

SEQ ID NO: 12 - protein, 5 aa, Homo sapiens
MASLP

SEQ ID NO: 13 - protein, 4 aa, Homo sapiens
ASLP

SEQ ID NO: 14 - protein, 8 aa, Salmonella typhimurium
TVEKSVVF

SEQ ID NO: 15 - protein, 12 aa, Homo sapiens
GDYDAPTHQVQW

SEQ ID NO: 16 - protein, 8 aa, Homo sapiens
SMDQGSTW

SEQ ID NO: 17 - protein, 8 aa, Salmonella typhimurium
STDGGKTW

SEQ ID NO: 18 - protein, 8 aa, Homo sapiens
PRPPAPEA

SEQ ID NO: 19 - protein, 8 aa, Homo sapiens
QTPLEAAC

SEQ ID NO: 20 - protein, 9 aa, Homo sapiens
NPRPPAPEA

SEQ ID NO: 21 - protein, 7 aa, Unknown
  Description of Unknown: Recombinant mutant human sialidase substitution sequence
SQNDGES

SEQ ID NO: 22 - protein, 7 aa, Unknown
  Description of Unknown: Recombinant mutant human sialidase substitution sequence
LSHSLST

SEQ ID NO: 23 - DNA, 1092 bp, Homo sapiens
gagaacgactttggactggtgcagcctctggtcaccatggaacagctgctgtgggtttccggcagacagatcggcagcgtggacaccttcagaatccctctgatcaccgccacacctagaggcaccctgctggcctttgccgaggccagaaagatgagcagctctgacgagggcgccaagtttattgccctgaggcggtctatggaccagggctctacatggtcccctaccgccttcatcgtgaacgatggcgacgtgcccgatggcctgaatctgggagctgtggtgtccgatgtggaaaccggcgtggtgttcctgttctacagcctgtgtgcccacaaggccggttgtcaggtggccagcacaatgctcgtgtggtccaaggacgacggcgtgtcctggtctacccctagaaacctgagcctggacatcggcaccgaagtgtttgctccaggacctggctctggcatccagaagcagagagagcccagaaagggcagactgatcgtgtgtggccacggcacccttgagagagatggcgttttctgcctgctgagcgacgatcatggcgcctcttggagatacggcagcggagtgtctggaatcccttacggccagcctaagcaagagaacgatttcaaccccgacgagtgccagccttacgagctgcctgatggcagcgtcgtgatcaacgcccggaaccagaacaactaccactgccactgccggatcgtgctgagaagctacgacgcctgcgataccctgcggcctagagatgtgaccttcgatcctgagctggtggaccctgttgttgccgctggtgccgtcgtgacatctagcggcatcgtgttcttcagcaaccctgctcaccccgagttcagagtgaatctgaccctgcggtggtccttcagcaatggcacaagctggcggaaagaaaccgtgcagctttggcctggacctagcggctactcttctctggctacactggaaggcagcatggacggcgaagaacaggcccctcagctgtacgtgctgtacgagaagggcagaaaccactacaccgagagcatcagcgtggccaagatcagcgtt

SEQ ID NO: 24 - DNA, 1140 bp, Homo sapiens
atggccagcctgcctgtgctgcagaaagaaagcgtgttccagtctggcgcccacgcctacagaattcccgctctgctgtatctgccaggccagcagtctctgctggctttcgctgaacagcgggccagcaagaaggatgagcacgccgaactgatcgtgctgcggagaggcgattacgacgcccctacacatcaggtgcagtggcaggctcaagaggtggtggctcaggctagactggacggccacagatctatgaacccctgtcctctgtacgatgcccagaccggcacactgtttctgttctttatcgctatccccggccaagtgaccgagcagcagcagctgcagacaagagccaacgtgaccagactgtgtcaagtgacctccaccgaccacggcagaacctggtctagccctagagatctgaccgacgccgccatcggacctgcctatagagagtggtccaccttcgccgttggacctggacactgtctccagctgcacgacagggctagatctctggtggtgcctgcctacgcctatagaaagctgcaccccatccagcggcctattcctagcgccttctgctttctgagccacgatcacggcaggacatgggccagaggacatttcgtggcccaggacacactggaatgccaggtggccgaagtggaaaccggcgagcagagagtcgtgaccctgaacgccagatctcacctgagagccagagtgcaggcccagagcacaaacgacggcctggatttccaagagagccagctggtcaagaaactggtggaacctcctccacagggctgtcagggaagcgtgatcagctttccatctcctagaagcggccctggctctcctgctcagtggctgctgtatacacaccccacacacagctggcagagagccgatctgggcgcctacctgaatcctagacctcctgctcctgaggcttggagcgaacctgttctgctggccaagggcagctgtgcctacagcgatctgcagtctatgggcacaggccctgatggcagccctctgtttggctgtctgtacgaggccaacgactacgaagagatcgtgttcctgatgttcaccctgaagcaggcctttccagccgagtacctgcctcaa

SEQ ID NO: 25 - DNA, 1284 bp, Homo sapiens
atggaggaagtgaccacctgtagcttcaacagccctctgttccggcaagaggacgaccggggcatcacctacagaatccctgctctgctgtacatccctcctacacacacctttctggccttcgccgagaagcggagcaccagacgagatgaagatgccctgcacctggtgctgagaagaggcctgagaatcggacagctggtgcagtggggacctctgaagcctctgatggaagccacactgcccggccacagaaccatgaatccttgtcctgtgtgggagcagaaaagcggctgcgtgttcctgttcttcatctgcgtgcggggccacgtgaccgagagacagcaaatcgtgtccggcagaaacgccgccagactgtgcttcatctacagccaggatgccggctgctcttggagcgaagttcgggatctgaccgaagaagtgatcggcagcgagctgaagcactgggccacatttgctgttggccctggccacggaatccagctgcaatctggcagactggtcatccccgcctacacctactatatccccagctggttcttctgcttccaactgccttgcaagacccggcctcacagcctgatgatctacagcgacgatctgggcgtgacatggcaccacggcagactgatcagacccatggtcaccgtggaatgcgaggtggccgaagtgacaggcagagctggacaccctgtgctgtactgctctgccagaacacccaaccggtgtagagccgaggctctgtctacagatcacggcgagggctttcagagactggccctctctagacagctgtgcgaacctcctcatggctgtcagggcagcgtggtgtccttcagacctctggaaatccctcaccggtgccaggacagcagctctaaggatgcccctaccatccagcagtctagccctggcagcagcctgagactggaagaggaagccggaacacctagcgagagctggctgctgtactctcaccccaccagcagaaagcagagagtggacctgggcatctacctgaatcagacccctctggaagccgcctgttggagcagaccttggattctgcactgtggcccttgcggctactctgatctggccgctctggaagaagagggcctgttcggctgcctgtttgagtgcggcacaaagcaagagtgcgagcagatcgccttccggctgttcacccacagagagatcctgagccatctgcagggcgactgcacaagcccaggcagaaatcccagccagttcaagagcaac

SEQ ID NO: 26 - DNA, 1452 bp, Homo sapiens
atgggcgtgcccagaacacccagcagaaccgtgctgttcgagagagagaggaccggcctgacctacagagtgccttctctgctgcctgtgcctcctggacctacactgctggccttcgtggaacagagactgagccccgatgattctcacgcccacagactggtgctgagaagaggaacactggctggcggctctgttagatggggagcactgcatgtgctgggcacagctgctcttgccgagcacagatccatgaatccctgtcctgtgcacgacgccggaaccggcacagtgtttctgttctttatcgccgtgctgggccacacacctgaggccgttcaaattgccaccggcagaaatgccgccagactgtgttgtgtggcctccagagatgccggcctgtcttggggatctgccagagatctgaccgaggaagccattggcggagccgttcaggattgggccacatttgctgttggacctggacacggcgtgcagctgccaagtggtagactgctggtgcctgcctacacatacagagtggatcggagagagtgcttcggaaagatctgccggacaagccctcacagcttcgccttctactccgacgatcacggccggacttggagatgtggtggcctggtgcctaatctgagaagcggcgaatgtcaactggccgccgttgatggtggacaggctggcagcttcctgtactgcaacgccagatctcctctgggctctagagtgcaggccctgtctaccgatgagggcaccagttttctgcccgccgaaagagttgcctctctgcctgaaacagcctggggctgtcagggctctatcgtgggatttcctgctcctgctccaaacagaccccgggacgattcttggagtgtcggccctggatctccactgcagcctccattgcttggaccaggcgttcacgagccacctgaagaggctgccgttgatcctagaggcggacaagttcctggcggcccttttagcagactgcagccaagaggcgacggccctagacaacctggaccaagacctggcgtcagcggagatgttggctcttggacactggccctgcctatgccttttgccgctcctcctcagtctcctacctggctgctgtactctcaccctgttggcagacgggccagactgcacatgggcatcagactgtctcagagccctctggaccccagaagctggacagagccttgggtcatctatgagggccctagcggctacagcgatctggcctctattggcccagctcctgaaggcggactggtgttcgcttgtctgtatgagagcggcgccagaaccagctacgacgagatcagcttctgcaccttcagcctgcgcgaggtgctggaaaatgtgcccgcctctcctaagcctcctaacctgggcgataagcctagaggctgttgctggccatct

SEQ ID NO: 27 - protein, 47 aa, Homo sapiens
MTGERPSTALPDRRWGPRILGFWGGCRVWVFAAIFLLLSLAASWSKA

SEQ ID NO: 28 - protein, 22 aa, Unknown
  Description of Unknown: N-terminal signal sequence
MDMRVPAQLLGLLLLWLPGARC

SEQ ID NO: 29 - protein, 4 aa, Unknown
  Description of Unknown: C-terminal lysosomal signal motif
YGTL

SEQ ID NO: 30 - protein, 382 aa, Salmonella typhimurium
MTVEKSVVFKAEGEHFTDQKGNTIVGSGSGGTTKYFRIPAMCTTSKGTIVVFADARHNTASDQSFIDTAAARSTDGGKTWNKKIAIYNDRVNSKLSRVMDPTCIVANIQGRETILVMVGKWNNNDKTWGAYRDKAPDTDWDLVLYKSTDDGVTFSKVETNIHDIVTKNGTISAMLGGVGSGLQLNDGKLVFPVQMVRTKNITTVLNTSFIYSTDGITWSLPSGYCEGFGSENNIIEFNASLVNNIRNSGLRRSFETKDFGKTWTEFPPMDKKVDNRNHGVQGSTITIPSGNKLVAAHSSAQNKNNDYTRSDISLYAHNLYSGEVKLIDDFYPKVGNASGAGYSCLSYRKNVDKETLYVVYEANGSIEFQDLSRHLPVIKSYN

SEQ ID NO: 31 - protein, 232 aa, Artificial Sequence
  Description of Artificial Sequence: Synthetic polypeptide
EPKSCDKTHTCPPCPAPELLGGPSVFLFPPKPKDTLMISRTPEVTCVVVDVSHEDPEVKFNWYVDGVEVHNAKTKPREEQYNSTYRVVSVLTVLHQDWLNGKEYKCKVSNKALPAPIEKTISKAKGQPREPQVYTLPPSREEMTKNQVSLTCLVKGFYPSDIAVEWESNGQPENNYKTTPPVLDSDGSFFLYSKLTVDKSRWQQGNVFSCSVMHEALHNHYTQKSLSLSPGK

SEQ ID NO: 32 - protein, 227 aa, Artificial Sequence
  Description of Artificial Sequence: Synthetic polypeptide
DKTHTCPPCPAPELLGGPSVFLFPPKPKDTLMISRTPEVTCVVVDVSHEDPEVKFNWYVDGVEVHNAKTKPREEQYNSTYRVVSVLTVLHQDWLNGKEYKCKVSNKALPAPIEKTISKAKGQPREPQVYTLPPSREEMTKNQVSLTCLVKGFYPSDIAVEWESNGQPENNYKTTPPVLDSDGSFFLTSKLTVDKSRWQQGNVFSCSVMHEALHNHYTQKSLSLSPGK

SEQ ID NO: 33 - protein, 232 aa, Artificial Sequence
  Description of Artificial Sequence: Synthetic polypeptide
EPKSCDKTHTCPPCPAPELLGGPSVFLFPPKPKDTLMISRTPEVTCVVVDVSHEDPEVKFNWYVDGVEVHNAKTKPREEQYNSTYRVVSVLTVLHQDWLNGKEYKCKVSNKALPAPIEKTISKAKGQPREPQVYTLPPSREEMTKNQVSLYCLVKGFYPSDIAVEWESNGQPENNYKTTPPVLDSDGSFFLYSKLTVDKSRWQQGNVFSCSVMHEALHNHYTQKSLSLSPGK

SEQ ID NO: 34 - DNA, 1383 bp, Homo sapiens
atgagacctgcggacctgcccccgcgccccatggaagaatccccggcgtccagctctgccccgacagagacggaggagccggggtccagtgcagaggtcatggaagaagtgacaacatgctccttcaacagccctctgttccggcaggaagatgacagagggattacctaccggatcccagccctgctctacataccccccacccacaccttcctggcctttgcagagaagcgttctacgaggagagatgaggatgctctccacctggtgctgaggcgagggttgaggattgggcagttggtacagtgggggcccctgaagccactgatggaagccacactaccggggcatcggaccatgaacccctgtcctgtatgggagcagaagagtggttgtgtgttcctgttcttcatctgtgtgcggggccatgtcacagagcgtcaacagattgtgtcaggcaggaatgctgcccgcctttgcttcatctacagtcaggatgctggatgttcatggagtgaggtgagggacttgactgaggaggtcattggctcagagctgaagcactgggccacatttgctgtgggcccaggtcatggcatccagctgcagtcagggagactggtcatccctgcgtatacctactacatcccttcctggttcttttgcttccagctaccatgtaaaaccaggcctcattctctgatgatctacagtgatgacctaggggtcacatggcaccatggtagactcattaggcccatggttacagtagaatgtgaagtggcagaggtgactgggagggctggccaccctgtgctatattgcagtgcccggacaccaaacaggtgccgggcagaggcgctcagcactgaccatggtgaaggctttcagagactggccctgagtcgacagctctgtgagcccccacatggttgccaagggagtgtggtaagtttccggcccctggagatcccacataggtgccaggactctagcagcaaagatgcacccaccattcagcagagctctccaggcagttcactgaggctggaggaggaagctggaacaccgtcagaatcatggctcttgtactcacacccaaccagtaggaaacagagggttgacctaggtatctatctcaaccagacccccttggaggctgcctgctggtcccgcccctggatcttgcactgtgggccctgtggctactctgatctggctgctctggaggaggagggcttgtttgggtgtttgtttgaatgtgggaccaagcaagagtgtgagcagattgccttccgcctgtttacacaccgggagatcctgagtcacctgcagggggactgcaccagccctggtaggaacccaagccaattcaaaagcaat

SEQ ID NO: 35 - DNA, 1488 bp, Homo sapiens
atgatgagctctgcagccttcccaaggtggctgagcatgggggtccctcgtaccccttcacggacagtgctcttcgagcgggagaggacgggcctgacctaccgcgtgccctcgctgctccccgtgccccccgggcccaccctgctggcctttgtggagcagcggctcagccctgacgactcccacgcccaccgcctggtgctgaggaggggcacgctggccgggggctccgtgcggtggggtgccctgcacgtgctggggacagcagccctggcggagcaccggtccatgaacccctgccctgtgcacgatgctggcacgggcaccgtcttcctcttcttcatcgcggtgctgggccacacgcctgaggccgtgcagatcgccacgggaaggaacgccgcgcgcctctgctgtgtggccagccgtgacgccggcctctcgtggggcagcgcccgggacctcaccgaggaggccatcggtggtgccgtgcaggactgggccacattcgctgtgggtcccggccacggtgtgcagctgccctcaggccgcctgctggtacccgcctacacctaccgcgtggaccgccgagagtgttttggcaagatctgccggaccagccctcactccttcgccttctacagcgatgaccacggccgcacctggcgctgtggaggcctcgtgcccaacctgcgctcaggcgagtgccagctggcagcggtggacggtgggcaggccggcagcttcctctactgcaatgcccggagcccactgggcagccgtgtgcaggcgctcagcactgacgagggcacctccttcctgcccgcagagcgcgtggcttccctgcccgagactgcctggggctgccagggcagcatcgtgggcttcccagcccccgcccccaacaggccacgggatgacagttggtcagtgggccccgggagtcccctccagcctccactcctcggtcctggagtccacgaacccccagaggaggctgctgtagacccccgtggaggccaggtgcctggtgggcccttcagccgtctgcagcctcggggggatggccccaggcagcctggccccaggcctggggtcagtggggatgtggggtcctggaccctggcactccccatgccctttgctgccccgccccagagccccacgtggctgctgtactcccacccagtggggcgcagggctcggctacacatgggtatccgcctgagccagtccccgctggacccgcgcagctggacagagccctgggtgatctacgagggccccagcggctactccgacctggcgtccatcgggccggcccctgaggggggcctggtttttgcctgcctgtacgagagcggggccaggacctcctatgatgagatttccttttgtacattctccctgcgtgaggtcctggagaacgtgcccgccagccccaaaccgcccaaccttggggacaagcctcgggggtgctgctggccctcc

SEQ ID NO: 36 - protein, 781 aa, Vibrio cholerae
MRFKNVKKTALMLAMFGMATSSNAALFDYNATGDTEFDSPAKQGWMQDNTNNGSGVLTNADGMPAWLVQGIGGRAQWTYSLSTNQHAQASSFGWRMTTEMKVLSGGMITNYYANGTQRVLPIISLDSSGNLVVEFEGQTGRTVLATGTAATEYHKFELVFLPGSNPSASFYFDGKLIRDNIQPTASKQNMIVWGNGSSNTDGVAAYRDIKFEIQGDVIFRGPDRIPSIVASSVTPGVVTAFAEKRVGGGDPGALSNTNDIITRTSRDGGITWDTELNLTEQINVSDEFDFSDPRPIYDPSSNTVLVSYARWPTDAAQNGDRIKPWMPNGIFYSVYDVASGNWQAPIDVTDQVKERSFQIAGWGGSELYRRNTSLNSQQDWQSNAKIRIVDGAANQIQVADGSRKYVVTLSIDESGGLVANLNGVSAPIILQSEHAKVHSFHDYELQYSALNHTTTLFVDGQQITTWAGEVSQENNIQFGNADAQIDGRLHVQKIVLTQQGHNLVEFDAFYLAQQTPEVEKDLEKLGWTKIKTGNTMSLYGNASVNPGPGHGITLTRQQNISGSQNGRLIYPAIVLDRFFLNVMSIYSDDGGSNWQTGSTLPIPFRWKSSSILETLEPSEADMVELQNGDLLLTARLDFNQIVNGVNYSPRQQFLSKDGGITWSLLEANNANVFSNISTGTVDASITRFEQSDGSHFLLFTNPQGNPAGTNGRQNLGLWFSFDEGVTWKGPIQLVNGASAYSDIYQLDSENAIVIVETDNSNMRILRMPITLLKQKLTLSQN

SEQ ID NO: 37 - DNA, 2424 bp, Vibrio cholerae
ttgtcaatcaagatgacttcacaacgaagaagagcatcgattcacaaggaaacagattctaatataaagggagtagatatgcgtttcaaaaacgtaaagaaaaccgctttaatgcttgcaatgttcggtatggcgacaagctcaaacgccgcactttttgactataacgcaacgggtgacactgagtttgacagtccagccaaacagggatggatgcaagacaacacgaataatggcagcggcgttttaaccaatgcagatggaatgcccgcttggttggtgcaaggtattggagggagagctcaatggacatattctctctctactaatcaacatgcccaagcatcaagtttcggttggcgaatgacgacagaaatgaaagtgctcagtggtggaatgatcacaaactactacgccaacggcactcagcgtgtcttacccatcatttcattagatagcagtggtaacttagttgttgagtttgaagggcaaactggacgcaccgttttggcaaccggcacagcagcaacggaatatcataaatttgaattggtattccttcctggaagtaacccatccgctagcttttacttcgatggcaaactcattcgtgacaacatccagccgactgcatcaaaacaaaatatgatcgtatgggggaatggctcatcaaatacggatggtgtcgccgcttatcgtgatattaagtttgaaattcaaggcgacgtcatcttcagaggcccagaccgtataccgtccattgtagcaagtagcgtaacaccaggggtggtaaccgcatttgcagagaaacgtgtggggggaggagatcccggtgctctgagtaataccaatgacataatcactcgtacctcacgagatggcggtataacttgggataccgagctcaacctcactgagcaaatcaatgtcagtgatgagtttgatttctccgatcctcggcctatctatgatccttcctccaatacggttcttgtctcttatgctcgatggccgaccgatgccgctcaaaacggagatcgaataaaaccatggatgccaaacggtattttttacagcgtctatgatgttgcatcagggaactggcaagcgcctatcgatgttaccgatcaggtgaaagaacgcagtttccaaatcgctggttggggtggttcagagctgtatcgccgaaataccagcctaaatagccagcaagactggcaatcaaacgctaagatccgaattgttgatggtgcagcgaaccagatacaagttgccgatggtagccgaaaatatgttgtcacactgagtattgatgaatcaggtggtctagtcgctaatctaaacggtgttagtgctccgattatcctgcaatctgaacacgcaaaggtacactctttccatgactacgaacttcaatattcggcgttaaaccacaccacaacgttattcgtggatggtcagcaaatcacaacttgggctggcgaagtatcgcaggagaacaacattcagtttggtaatgcggatgcccaaattgacggcagactgcatgtgcaaaaaattgttctcacacagcaaggccataacctcgtggagtttgatgctttctatttagcacagcaaacccctgaagtagagaaagaccttgaaaagcttggttggacaaaaattaaaacgggcaacaccatgagtttgtatggaaatgccagtgtcaacccaggaccgggtcatggcatcacccttactcgacaacaaaatatcagtggcagccaaaacggccgcttgatctacccagcgattgtgcttgatcgtttcttcttgaacgtcatgtctatttacagtgatgatggcggttcaaactggcaaaccggttcaacactccctatcccctttcgctggaagagttcgagtatcctagaaactctcgaacctagtgaagctgatatggttgaactccaaaacggtgatctactccttactgcacgccttgattttaaccaaatcgttaatggtgtgaactatagcccacgccagcaatttttgagtaaagatggtggaatcacgtggagcctacttgaggctaacaacgctaacgtctttagcaatatcagtactggtaccgttgatgcttctattactcggttcgagcaaagtgacggtagccatttcttactctttactaacccacaaggaaaccctgcggggacaaatggcaggcaaaatctaggcttatggtttagcttcgatgaaggggtgacatggaaaggaccaattcaacttgttaatggtgcatcggcatattctgatatttatcaattggattcggaaaatgcgattgtcattgttgaaacggataattcaaatatgcgaattcttcgtatgcctatcacattgctaaaacagaagctgaccttatcgcaaaactaa

SEQ ID NO: 38 - protein, 409 aa, Mus musculus
MVGADPTRPRGPLSYWAGRRGQGLAAIFLLLVSAAESEARAEDDFSLVQPLVTMEQLLWVSGKQIGSVDTFRIPLITATPRGTLLAFAEARKKSASDEGAKFIAMRRSTDQGSTWSSTAFIVDDGEASDGLNLGAVVNDVDTGIVFLIYTLCAHKVNCQVASTMLVWSKDDGISWSPPRNLSVDIGTEMFAPGPGSGIQKQREPGKGRLIVCGHGTLERDGVFCLLSDDHGASWHYGTGVSGIPFGQPKHDHDFNPDECQPYELPDGSVIINARNQNNYHCRCRIVLRSYDACDTLRPRDVTFDPELVDPVVAAGALATSSGIVFFSNPAHPEFRVNLTLRWSFSNGTSWLKERVQVWPGPSGYSSLTALENSTDGKKQPPQLFVLYEKGLNRYTESISMVKISVYGTL

SEQ ID NO: 39 - protein, 393 aa, Mus musculus
MTVQPSPWFSDLRPMATCPVLQKETLFRTGVHAYRIPALLYLKKQKTLLAFAEKRASKTDEHAELIVLRRGSYNEATNRVKWQPEEVVTQAQLEGHRSMNPCPLYDKQTKTLFLFFIAVPGRVSEHHQLHTKVNVTRLCCVSSTDHGRTWSPIQDLTETTIGSTHQEWATFAVGPGHCLQLRNPAGSLLVPAYAYRKLHPAQKPTPFAFCFISLDHGHTWKLGNFVAENSLECQVAEVGTGAQRMVYLNARSFLGARVQAQSPNDGLDFQDNRVVSKLVEPPHGCHGSVVAFHNPISKPHALDTWLLYTHPTDSRNRTNLGVYLNQMPLDPTAWSEPTLLAMGICAYSDLQNMGQGPDGSPQFGCLYESGNYEEIIFLIFTLKQAFPTVFDAQ

SEQ ID NO: 40 - protein, 418 aa, Mus musculus
MEEVPPYSLSSTLFQQEEQSGVTYRIPALLYLPPTHTFLAFAEKRTSVRDEDAACLVLRRGLMKGRSVQWGPQRLLMEATLPGHRTMNPCPVWEKNTGRVYLFFICVRGHVTERCQIVWGKNAARLCFLCSEDAGCSWGEVKDLTEEVIGSEVKRWATFAVGPGHGIQLHSGRLIIPAYAYYVSRWFLCFACSVKPHSLMIYSDDFGVTWHHGKFIEPQVTGECQVAEVAGTAGNPVLYCSARTPSRFRAEAFSTDSGGCFQKPTLNPQLHEPRTGCQGSVVSFRPLKMPNTYQDSIGKGAPATQKCPLLDSPLEVEKGAETPSATWLLYSHPTSKRKRINLGIYYNRNPLEVNCWSRPWILNRGPSGYSDLAVVEEQDLVACLFECGEKNEYERIDFCLFSDHEVLSCEDCTSPSSD

SEQ ID NO: 41 - protein, 501 aa, Mus musculus
METAGAPFCFHVDSLVPCSYWKVMGPTRVPRRTVLFQRERTGLTYRVPALLCVPPRPTLLAFAEQRLSPDDSHAHRLVLRRGTLTRGSVRWGTLSVLETAVLEEHRSMNPCPVLDEHSGTIFLFFIAVLGHTPEAVQIATGKNAARLCCVTSCDAGLTWGSVRDLTEEAIGAALQDWATFAVGPGHGVQLRSGRLLVPAYTYHVDRRECFGKICWTSPHSLAFYSDDHGISWHCGGLVPNLRSGECQLAAVDGDFLYCNARSPLGNRVQALSADEGTSFLPGELVPTLAETARGCQGSIVGFLAPPSIEPQDDRWTGSPRNTPHSPCFNLRVQESSGEGARGLLERWMPRLPLCYPQSRSPENHGLEPGSDGDKTSWTPECPMSSDSMLQSPTWLLYSHPAGRRARLHMGIYLSRSPLDPHSWTEPWVIYEGPSGYSDLAFLGPMPGASLVFACLFESGTRTSYEDISFCLFSLADVLENVPTGLEMLSLRDKAQGHCWPS

SEQ ID NO: 42 - DNA, 3850 bp, Mus musculus
gggtcacatgctgatggactaattggagtcgcggcagcgcgggctgcggcccccaaggggaggggtcggagtgacgtgcgcgcttttaaagggccgaggtcagctgacggcttgccaccggtgaccagttcctggacagggatcgccgggagctatggtgggggcagacccgaccagaccccggggaccgctgagctattgggcgggccgtcggggtcaggggctcgcagcgatcttcctgctcctggtgtccgcggcggaatccgaggccagggcagaggatgacttcagcctggtgcagccgctggtgaccatggagcagctgctgtgggtgagcgggaagcagatcggctctgtagacactttccgcatcccgctcatcacagccacccctcggggcacgctcctggccttcgctgaggccaggaaaaaatctgcatccgatgagggggccaagttcatcgccatgaggaggtccacggaccagggtagcacgtggtcctctacagccttcatcgtagacgatggggaggcctccgatggcctgaacctgggcgctgtggtgaacgatgtagacacagggatagtgttccttatctataccctctgtgctcacaaggtcaactgccaggtggcctctaccatgttggtttggagtaaggacgacggcatttcctggagcccaccccggaatctctctgtggatattggcacagagatgtttgcccctggacctggctcaggcattcagaaacagcgggagcctgggaagggccggctcattgtgtgtggacacgggacgctggagcgagatggggtcttctgtctcctcagtgatgaccacggtgcctcctggcactacggcactggagtgagcggcattccctttggccagcccaaacacgatcacgatttcaaccccgacgagtgccagccctacgagcttccagatggctcggtcatcatcaacgcccggaaccagaataactaccattgccgctgcaggatcgtcctccgcagctatgacgcctgtgacaccctcaggccccgggatgtgaccttcgaccctgagctcgtggaccctgtggtagctgcaggagcactagccaccagctccggcattgtcttcttctccaatccagcccaccctgagttccgagtgaacctgaccctgcgctggagtttcagcaatggtacatcctggcagaaggagagggtccaggtgtggccgggacccagcggctactcgtccctgacagccctggaaaacagcacggatggaaagaagcagcccccgcagctgttcgttctgtacgagaaaggcctgaaccggtacaccgagagcatctccatggtcaaaatcagcgtctacggcacgctctgagccccgtgcccaaaggacaccaagtcctggtcgctgacttcacagctctctggaccatctgcagagggtgcctgaaacacagctcttcctctgaactctgaccttttgcaacttctcatcaacagggaagtctcttcgttatgacttaacacccagcttcctctcggggcaggaagtccctccgtcaccaagagcacttttttccagtatgctggggatggcccctgtccattctcttccaggacaacggagctgtgcctttctgggacaggatgggggaggggctccccctggagagatgaacagatacgaactcagggaactgagaaggcccggtgtcctagggtacaaaggcaggtactagatgtgattgctgaaagtccccagggcagagtgtcctttcagagcaaggataagcacacctacgtgtgcacctttgattatttatgaatcgaaatatttgtaacttaaaatttttgatgcagaaaaagcgtttgtggagtctgtggttctgtctgctcacgccttcccaattgcctcctggagagacaggaaggcagctggaagaggagccgatgtacttactgggaagcagaaacccctagattccatcctggctgctgctgtttgcaagtgtcaaagatgggggggcgtgtttatattttatatttctaagatggggtggcataggaaatagggaacagatgtgtaaaaccagatgggaaggacagtctgtgagaaaggagcaagcagttgctgcaggtgtgggagagcaaagcccttctccacgtggaaagagcccagatggacgctaagcatgttgggcacctgtaaccccgcactcgctggactgacggtgtagctcagtggtggagctagtacttggaacgcctaagactctgggttcagtccttgggggggggggtatgtgtttattgagaggaaggtgtacgtactgtaggtcagaggacagcttactggagttgtctctctccttcacgctgtgagtcctgtggaatgacctcaggtgtcagagttgggggcaggtgcctttgccagctgagccatcttgctgtctctgctttaatttaaaaaaaaaaaaaaaaaagaatattaaggtctgagggattcgggctgcgttcatttcaattagagggtcatatttcttttgacatttcttctctaagaaatgttaagatcatttgttctgtgtgatagaggtatagctccattgtatgtcagcagtgagggatcctgtgcattttatccagagtttgtacggtgttctaggggctgctagtgcagcccagtgctaaacacttcagcatgcacaaggcctcaatcagtgcatgcatgtgcacacacacacagacacacacgtacacactgacacaggtacacaaatacacactggcccacatgtacacatcgactcacaggtacacagacccactttgacacacatatacacagacacaaacgcactggcacacacatatacacaggcacacatggatagatggacacacgtgtacacatacacacacacacagaaatacaaatgttcaggttttctaaaaaaaaaaaaattagagacgtgttgacttcatttttagcaaaaatcctgtcatgtatcttaaagtggattgaacccactatgtagcccaggctggcctccaaatgggcatccttctgcctcagtctcccgagggctaggataacaggagtatgccatcacacctggctaatagaaattttcaaaattgtttgtttgaaggtgactcttactatattgcctaactgatctccagttcgtgaaatcctcctgcctcagaaccaggactgtcaatataacccaccaagacaggccaacattcacaattgattgttagtttgtggtctgaatcaaggtcttatactgtagcccaggctagcccggaatacacgatatctccagtgcttcagatcctcagttctaactaagcatggccacatccatgtttaactgcaaatttgatgttaccatggtttggtttggtttggtttggtttggtttggtttggtttggttttttggccattttttttttctcatgctgaggccttgtgctctcaagttggggagacagcatggagggtagctgcaactgtaaccccagttccaggggacctgacaccctctggcctccacaagtattaggcacatctgtggtgcacagacatacaatcaggcaaaatattcatacacataaaataaaataatttaaaacaaaagcaaaaatcaggacctaagaaaaaaatctattcctgattcttttatgttttgtttgtattttatcaagacagggttgtttctctgtatagccctggctgtcttggaattcactctgtagaccaggctggcctcaaactcagaaatcctcctgcctttgccttccaagtgctggaattaaaggcatgcgccacc

SEQ ID NO: 43 - DNA, 1722 bp, Mus musculus
gacatgacccaaacggcccctggctgcaaggtaatatcggaagttgactaagaatggacgccccaccactgactgacccgccccctgagtctgagattggacttgtctctggatacagtcatactttgaggtactacaagttagaaactgttaggttactcagttcagtccatgacagtccaaccttctccatggttttccgatctcaggcccatggcgacctgccctgtcctgcagaaggagacactgttccgcacaggcgtccatgcttacagaatccctgctctgctctacctgaagaagcagaagaccctgctggcctttgcggaaaagcgagccagcaagacggatgagcacgcagagttgattgtcctgagaagaggaagctacaacgaagccaccaaccgtgtcaagtggcagcctgaggaagtggtgacccaagcccagctggaaggccaccgctccatgaatccatgtcccttgtatgacaagcaaacaaagaccctcttccttttcttcatcgctgtccctgggcgtgtatcagaacatcatcagctccacactaaggttaatgtcacacggctgtgctgtgtcagcagcactgaccatgggaggacctggagccccatccaggacctcacagagaccaccattggcagcactcatcaggaatgggccacatttgctgtgggtcctgggcattgtctgcagctgcggaacccagctgggagcctgctggtacctgcttatgcctaccggaaactgcaccctgctcagaagcctaccccctttgccttctgcttcatcagccttgaccatgggcacacatggaaactaggcaactttgtggctgaaaactcactggagtgccaggtggctgaggttggcactggagctcagaggatggtatatctcaatgctaggagcttcctgggagccagggtccaggcacaaagtcctaatgatggtctggatttccaggacaaccgggtagtgagtaagcttgtagagcccccccacgggtgtcatggaagtgtggttgccttccacaaccccatctctaagccacatgccttagacacatggcttctttatacacaccctacagactccaggaatagaaccaacctgggtgtgtacctaaaccagatgccactagatcccacagcctggtcagagcccaccctgctggccatgggcatctgtgcctactcagacttacagaacatggggcaaggccctgatggctccccacagtttgggtgtctgtatgaatcaggtaactatgaagagatcattttcctcatattcaccctgaagcaagctttccccactgtatttgatgcccagtgatctcagtgcacgtggcccaaagggcttccttgtgcttcaaaacacccatctctctttgcttccagcatcctctggactcttgagtccagctcttgggtaacttcctcaggaggatgcagagaatttggtctcttgactctctgcaggccttattgtttcagcctctggttctcttttcagcccagaaatcaaaggagcctggctttcctcagcctgttggcagggcaggtggggacagtatatatagaggctgccattctgcatgtcggttgtcactatgctagtttaacctgcctgtttccccatgcctagtgtttgaatgagtattaataaaatatccaacccagcccatttcttcctggaaaaaaa

SEQ ID NO: 44 - DNA, 3340 bp, Mus musculus
actgcgcggtgaaggggcgtggcctggccggggaggttgacacccagacgctgctctcagtcctctggcgcctgctccccagcgcattccttctgctcctgggatatttgtctcattactgccagttcttgcgcagcggtcactgggttcgtttcagcgtctgtggtttctgtcgctgttatccagtctccatcgccccagctcagcttcaggccttcttccgagactccacgggagagcccagagagcctccggagccgaagccatggaggaagtcccaccctactccctcagcagcaccctgttccagcaggaagaacagagtggggtgacctaccggatcccagccctgctgtaccttcctcccacccacaccttcctggcctttgcagagaagcggacctcagtcagagatgaggatgctgcctgcctggtgctcagacgagggctgatgaaggggcgctctgtacagtggggcccccaacggctactgatggaggccacattacctgggcatcgcaccatgaacccctgccctgtgtgggagaaaaatactggccgtgtgtacctgtttttcatctgtgtgcggggccatgttactgagaggtgccagattgtgtggggcaaaaatgccgcccgtctctgcttcctttgcagtgaagatgccggctgctcttggggtgaagtgaaagacttgaccgaggaggtcattggctcagaggtgaagcgctgggccacatttgctgtgggcccaggtcatggcatccagctacactcgggaaggctgatcatccccgcctatgcctactatgtctcacgttggtttctctgctttgcgtgttcagtcaagccccattccctgatgatctacagtgatgactttggagtcacatggcaccatggcaagttcattgagccccaggtgacaggggagtgccaagtggccgaagtggctgggacggctggtaaccctgtgctcactgcagtgcccgaacaccaagccgatttcgagcagaggcttttagtactgatagtggtggctgctttcagaagccaaccctgaacccacaactccatgagcctcgaaccggctgccaaggtagtgtagtgagcttccggcctttgaagatgccaaatacctatcaagactcaattggcaaaggtgctcccgctactcagaagtgccctctgctggacagtcctctggaggtggagaaaggagctgaaacaccatcagcaacatggctcttgtactcacatccaactagcaagaggaagaggattaacctaggcatctactacaaccggaaccccttggaggtgaactgctggtcccgcccgtggatcttgaaccgtgggcccagtggctactctgatctggctgttgtggaagaacaggacttggtggcgtgtttgtttgagtgtggggagaagaatgagtatgagcggattgacttctgtctgttttcagaccatgaggtcctgagctgtgaagactgtaccagccctagtagcgactaaagccaaatcaagacggatgagtgaggcccagcttcccacagaaaggaatggcagctacagccagggtaacagaggtctctgatgtctagagaaaactctaaaaactaataatctgctccttgaattttttcacttttcccttcaatgagcatggtgaaaattgtgccatatcttacataacgaggctcttgaactgggagtttgaatctcttctcttcccattaaaaggagaggccatgtgctcgcttcgcgttcgacaaagcctggattctgatcttgagtggaagccacaggcttgtcttttccaatggttcactgctcacctgagtattaggtgatgtgtaggtgccttggccagaagaaagatctgtgttgttgtatttttttaaatttatttatttactatatgtaagtacactgcagctgtcttcagacacaccagaagagggcgtcagatctcattagagatggttgtgagccaccatgtggttgctgggatttgaactcaggaccttcagaagagcagtcagtgctcttaactactgagccatctctcaagccccgcattgctgtatttttaataagaaaaatgcccttatccttccaataatgcctggagctgtacaaattctctgtcttagaagacttgagaaagcagaactgtaaggtcagatgctttctccagccttgatgctgtgttccaccttcccttcctcatccagaaaacagttactagggagaaaatgagaaacccatgccagctgcccttgatgatggttgataacggtgcttattgcttttgatgtcattacctctgttagagatgaatcagagtcagaggtccttagctgcatccacccatttccagggggacattctaacactgctgaacagtcagctaaaatgagagctgtgtgtcctagcctgattccaggttagtcatgatgcttcctggagctgggcttttatctaatcccaggagccatctaggggaggctcagagctagcaggtgatcttcctgagatggtttcaccgtgacaggtgaaccatgagcccttccaagcaaggccaaaggacaacattataggaaagatttctagtattaatatgccttttctctgtgtgtgtactgtcttgtagtgatgctatatagacaaatagatgatttcttattttttgtttgtttgtttgtttttttgtttttctgtagccctagctgtcctggaactcactttgtaaaccaggctggcctcgatctcagaaatccgcctgcctctgcctcccgagtgctgggattaaaggtgtgcaccaccacaccttaatgatgatcctataagtattcctaaaattatactagtaattattaactcctttataataggactgctattaaagccctcgctgatatgaaaactacagtgagaactctgccagtcttcacatgtcataattacttctgagatagaaagcaggcatttacaacttagaacacatttcttagagctgtaaaacaattaactagaggtcataaaagggaatgaaagatttattgtaggtgctaggacagaacataaaatattgactgggcttatctatatgaaacttcattgttaacttttacacaagaattatggtttttaactttcagtgaacctgcggagctagtgacagaagagaaatgtctagttagataactactcttaatggaaattcacataaacatctgttgccatcttctttttgaatttatgtttaaacttgtgaatgtttgaattagacactacgcgagcacatagaaaataaagaactaagcgtgaa

SEQ ID NO: 45 - DNA, 4608 bp, Mus musculus
ggacagtgtgcatcacggagcttgtggcccagactgtgcctggcagacccagaggacctaaggcttggctctagtggtggtcagcacagccctcggtggtctgcggagcctgatattgctttacgtaagggctgttctgctgtgcatctcctgtgtctgaagctattcgccatggagactgctggagctcccttctgcttccatgtggactccctggtaccttgctcctactggaaggttatggggcccacgcgtgttcccaggagaacggtgctcttccagagggaaaggacgggcctgacctaccgtgtgcctgcgttactctgtgtgcctcccaggcctactctgctggccttcgcggaacagcgacttagccctgatgactcccatgcccaccgcctggtgctacggaggggcacgctgaccaggggctcagtgcggtggggcactctgagtgtactggagactgcagtactggaggagcacaggtctatgaacccttgcccggtgctggatgagcactctggtaccatcttcctcttcttcattgccgtgctgggccacacaccggaggccgtgcaaatcgccactggcaagaacgctgctcgcctctgctgtgtgaccagctgtgacgctggcctcacctggggcagtgttcgagatctcactgaggaagccattggtgctgcattgcaggactgggccacctttgctgtgggtccgggccatggagttcagctgcgctcgggtcgcctgcttgttcctgcttacacctatcatgtggaccgacgggaatgttttggcaagatctgctggaccagtccccactccttggcattctacagtgatgatcatgggatctcctggcattgtggaggccttgtgcccaacctacgctctggagagtgccaactggctgcggtagatggagactttctctactgtaatgctcgaagccctctgggtaaccgtgtgcaggcactgagtgctgatgaaggcacgtccttcctaccaggggagctggtgcctacattggcagagacggctcgtggttgccagggtagcattgtgggcttcctagctccaccctcaatcgagcctcaggatgaccggtggacagggagtcctaggaacaccccacattccccatgcttcaatctcagagtacaggagtcttcgggggaaggtgccagaggtcttcttgaacgttggatgcccaggttgcctctctgctacccacagtcccggagcccagagaatcatggcctagagcctgggtcagatggagataagacatcctggactccggaatgtcctatgtcctctgattccatgcttcagagccccacatggctactatattcccacccagcagggcgtagagctcggctccacatgggaatctacctgagccgatcccccttggatccccacagctggacagagccctgggtgatctatgagggccccagtggctactctgaccttgcctttcttgggcctatgcctggggcatccctggtttttgcctgtctgtttgagagcgggaccaggacttcctatgaagacatttctttttgcttgttctcactggcggatgtcctggagaatgtgcccactggcttagagatgctaagtctcagggataaggctcaggggcattgctggccctcttgatggcctcaccctctcgtagccgcctggagaggaagggtagactatatagaggaggttaggggtaggtcagcatgatgctaggatggagagagctctgtcccctcgtggatggtggtggtgactcacccggggggccagctgctttctgagtgcaaatgagaaaaataaagagctgcgctgtgacttttctttccacatcaaagcttgggtgtcagtgctttagcttgatgctctgatcaccatgcaaatcttccaccggcgccttgctcagctttcatatcccaagggtgcctgggaggaaggcaacagggacagtggacatcactgcaccactttccacgaccctgtgtgccaacctcagccactttgaaacatgctgatgactgaggtctgttcactttcttaatttcaagcaggagaagcaggttggggagccagcctccccagctagaggggacagaacttgacttgagcaggggggtacctcctaggacctgctccatgtgcctacttctttacccttctctagagagggctcttgtcctgtcagagctgttttctcccttctcttgttttttctttttcaagactgtttctctgtgttagccctggctgtcctggatctcactctgtagatcaggctgaccttgagttcaaagctccatctgcctctacttctcacattactgtgattaaaggcatatactaccactgcctggtgcccttttgtatttcttattaaagtcctaatgtctgattataaaaacagtctgtgtgggctggagtgatggcttactcagtaaagcacttgccatggaatctgggcaatctgagtttcatttttagcatcctgtaaaaatcccaatttgatggtgtacttgtaatgtcagcatggagaggcagagataggtaagttccccaagactctttgaaccgacagcttggcctcactggcacattccaggtctcagtgagagaccctgcctcaaaatacaaagaaagagctgctgaagagtgggtcagagttgacctctgatctccggaagtatatgatacacacccgtgcatgcactcttccttacaaaataaaaagcaaaacaaaaccccaacaggtatatggccattttagaaaaattagaagatttagaaagctatacataaaaaaaaatgacctaaagaaaaatctttactgttctgggcactatccctatcaaaccactgtgttctttggccaagccttggggtggacactgttttgaggtgggtcctgttatctccactaggtagtggagttttgtgtcagactaactgggtcttaaagctgtctttaaggccatcaggagctactgacttgcctgcctcagcagagcatatcctgaaggtcggggttaagtctccttcccgagcgagttgccttccagtgggcccctggactcctaggtcctcagcgctcatcagctgccaaggactctgagggaatgtcctctgactgtggccccgaaaggtaggggagggggatgtgcttaggcttaggacagggtcctgtttcagtctgccttcactgttagtagcactgtgccacatggcacagactgggcgagctttaaaggaaggaggttgatattggttcccacttctggggatcatggttgagcagccttgtctgatgatggttgtcttgatggtagatcgtgaggtagttgatgaaggtatgacatggtgagaaactctgtgtgtgtgtgttattttctctgtgttctacctatacatctatctatgtatatatgtatctatctatctacctggaggctggagagatagcttagtggttaagaacatttgttgttcttgcatagtcctggatttaaattttcagcacccacatggcagctcacaacaacccataaatccagtttcagaggatccaacctctgatataccatgtcagccagagcagacacggctgaaggtggtttgatccccgtatggagaggtgacaattgggaagagagaaagatcaacttaaccatgcaaggaacaggaagttaaatactgaacagggaaggtaaaggcaggaagtagatgtagagggcaaatcaatgaaacccaaacatacccaaattacgctaaacacacactgacatgccaattaaaaggacaaattggctccactggcaaaaccaaaacagacactgaagatccaaacagtcacatgccaactaccgcggagggagacagacacagagaagaccgtgacagacacttggacactcttgagagtggatgtgcaggaagagagctctgccagtggagaagaaagcactcagaagaaagtgacagcagctgtaaatttgtattctgctaatgttatgttccaaagttgaaagcaaaattgtaccaattcataagaacaaacaggctgactctcagttgtgactgaacgtctctcagtaactgacggggcgagcaggccaaaggagagtcggctcagaagggtgcatagccacgccaaatcaaataagcaagtacaaccggcaggctctatttctagcacaaaggggtctgtgcctcattctgtgcttgggtcagagcttgggtctctcatttggatgtaagtggtgtagtggagaagcaggaaataatccggagcgcatattttgattttaacataagtgctgatttgggagggagttttgtcaaattgtgtttttacaatgtttttttttttttaaatgatgcttttttgtaaagtgtacaaatgtgatataagattggttctgctacattcagtttctataaaagtggttctaaaatattgtactgtcaatcatctcatgattattctactgtacacattactgactttgtatgtaataattaatattagaagaaaatataatttatttgaatataaaaaaaaaaaaaaaaaaa

SEQ ID NO: 46 - protein, 380 aa, Artificial Sequence
  Description of Artificial Sequence: Synthetic polypeptide
  MOD_RES (1)..(1): Ala, Arg, Asn, Asp, Gln, Glu, Gly, His, Leu, Lys, Met, Phe, Thr, Val, or not present
  MOD_RES (6)..(6): Phe, Trp, Tyr or Val
  MOD_RES (9)..(9): Lys or Asp
  MOD_RES (62)..(62): Pro, Asn, Asp, His, Glu, Gly, Ser or Thr
  MOD_RES (93)..(93): Ala, Glu, or Lys
  MOD_RES (187)..(187): Arg, Ile, or Lys
  MOD_RES (270)..(270): Gln, Ala, His, Phe, or Pro
  MOD_RES (301)..(301): Ser or Arg
  MOD_RES (302)..(302): Trp or Lys
  MOD_RES (332)..(332): Ala, Cys, Ser, or Val
  MOD_RES (363)..(363): Val or Arg
  MOD_RES (365)..(365): Leu, Gln, His, Ile, Lys, or Ser
  See specification as filed for detailed description of substitutions and preferred embodiments
XASLPXLQXESVFQSGAHAYRIPALLYLPGQQSLLAFAEQRASKKDEHAELIVLRRGDYDAXTHQVQWQAQEVVAQARLDGHRSMNPCPLYDXQTGTLFLFFIAIPGQVTEQQQLQTRANVTRLCQVTSTDHGRTWSSPRDLTDAAIGPAYREWSTFAVGPGHCLQLHDRARSLVVPAYAYRKLHPXQRPIPSAFCFLSHDHGRTWARGHFVAQDTLECQVAEVETGEQRVVTLNARSHLRARVQAQSTNDGLDFQESQLVKKLVEPPPXGCQGSVISFPSPRSGPGSPAQWLLYTHPTHXXQRADLGAYLNPRPPAPEAWSEPVLLAKGSXAYSDLQSMGTGPDGSPLFGCLYEANDYEEIXFXMFTLKQAFPAEYLPQ

SEQ ID NO: 47 - protein, 380 aa, Artificial Sequence
  Description of Artificial Sequence: Synthetic polypeptide
  MOD_RES (1)..(1): Ala, Arg, Asn, Asp, Gln, Glu, Gly, His, Leu, Lys, Met, Phe, Thr, Val, or not present
  MOD_RES (2)..(2): Ala or Lys
  MOD_RES (4)..(4): Asn or Leu
  MOD_RES (5)..(5): Pro or His
  MOD_RES (6)..(6): Phe, Trp, Tyr or Val
  MOD_RES (9)..(9): Lys or Asp
  MOD_RES (44)..(44): Lys, Arg, or Glu
  MOD_RES (45)..(45): Lys, Ala, Arg, or Glu
  MOD_RES (54)..(54): Leu or Met
  MOD_RES (62)..(62): Pro, Asn, Asp, His, Glu, Gly, Ser or Thr
  MOD_RES (69)..(69): Gln or His
  MOD_RES (78)..(78): Arg or Lys
  MOD_RES (93)..(93): Ala, Glu or Lys
  MOD_RES (107)..(107): Gly or Asp
  MOD_RES (108)..(108): Gln or His
  MOD_RES (112)..(112): Gln, Arg, or Lys
  MOD_RES (125)..(125): Ala, Cys, Ile, Ser, Val, or Leu
  MOD_RES (126)..(126): Gln or Leu
  MOD_RES (150)..(150): Ala or Val
  MOD_RES (164)..(164): Cys or Gly
  MOD_RES (171)..(171): Ala or Gly
  MOD_RES (187)..(187): Arg, Ile, or Lys
  MOD_RES (196)..(196): Ala, Cys, Leu, or Val
  MOD_RES (217)..(217): Leu, Ala, or Val
  MOD_RES (249)..(249): Thr or Ala
  MOD_RES (251)..(251): Asp or Gly
  MOD_RES (257)..(257): Glu or Lys
  MOD_RES (270)..(270): Gln, Ala, His, Phe, or Pro
  MOD_RES (272)..(272): Cys or Val
  MOD_RES (292)..(292): Trp or Arg
  MOD_RES (301)..(301): Ser or Arg
  MOD_RES (302)..(302): Trp or Lys
  MOD_RES (325)..(325): Lys or Val
  MOD_RES (332)..(332): Ala, Cys, Ser, or Val
  MOD_RES (352)..(352): Cys, Leu, or Val
  MOD_RES (363)..(363): Val or Arg
  MOD_RES (365)..(365): Leu, Gln, His, Ile, Lys, or Ser
  See specification as filed for detailed description of substitutions and preferred embodiments
XXSXXXLQXESVFQSGAHAYRIPALLYLPGQQSLLAFAEQRASXXDEHAELIVXRRGDYDAXTHQVQWXAQEVVAQAXLDGHRSMNPCPLYDXQTGTLFLFFIAIPXXVTEXQQLQTRANVTRLXXVTSTDHGRTWSSPRDLTDAAIGPXYREWSTFAVGPGHXLQLHDRXRSLVVPAYAYRKLHPXQRPIPSAFXFLSHDHGRTWARGHFVAQDTXECQVAEVETGEQRVVTLNARSHLRARVQAQSXNXGLDFQXSQLVKKLVEPPPXGXQGSVISFPSPRSGPGSPAQXLLYTHPTHXXQRADLGAYLNPRPPAPEAWSEPXLLAKGSXAYSDLQSMGTGPDGSPLFGXLYEANDYEEIXFXMFTLKQAFPAEYLPQ

SEQ ID NO: 48 - protein, 380 aa, Artificial Sequence
  Description of Artificial Sequence: Synthetic polypeptide
DASLPYLQKESVFQSGAHAYRIPALLYLPGQQSLLAFAEQRASKKDEHAELIVLRRGDYDAGTHQVQWQAQEVVAQARLDGHRSMNPCPLYDEQTGTLFLFFIAIPGQVTEQQQLQTRANVTRLCQVTSTDHGRTWSSPRDLTDAAIGPAYREWSTFAVGPGHCLQLHDRARSLVVPAYAYRKLHPKQRPIPSAFCFLSHDHGRTWARGHFVAQDTLECQVAEVETGEQRVVTLNARSHLRARVQAQSTNDGLDFQESQLVKKLVEPPPQGCQGSVISFPSPRSGPGSPAQWLLYTHPTHSWQRADLGAYLNPRPPAPEAWSEPVLLAKGSAAYSDLQSMGTGPDGSPLFGCLYEANDYEEIVFLMFTLKQAFPAEYLPQ

SEQ ID NO: 49 - protein, 380 aa, Artificial Sequence
  Description of Artificial Sequence: Synthetic polypeptide
DASLPYLQDESVFQSGAHAYRIPALLYLPGQQSLLAFAEQRASKKDEHAELIVLRRGDYDAPTHQVQWQAQEVVAQARLDGHRSMNPCPLYDEQTGTLFLFFIAIPGQVTEQQQLQTRANVTRLCQVTSTDHGRTWSSPRDLTDAAIGPAYREWSTFAVGPGHCLQLHDRARSLVVPAYAYRKLHPKQRPIPSAFCFLSHDHGRTWARGHFVAQDTLECQVAEVETGEQRVVTLNARSHLRARVQAQSTNDGLDFQESQLVKKLVEPPPQGCQGSVISFPSPRSGPGSPAQWLLYTHPTHSWQRADLGAYLNPRPPAPEAWSEPVLLAKGSAAYSDLQSMGTGPDGSPLFGCLYEANDYEEIRFIMFTLKQAFPAEYLPQ

SEQ ID NO: 50 - protein, 380 aa, Artificial Sequence
  Description of Artificial Sequence: Synthetic polypeptide
DASLPYLQKESVFQSGAHAYRIPALLYLPGQQSLLAFAEQRASKKDEHAELIVLRRGDYDANTHQVQWQAQEVVAQARLDGHRSMNPCPLYDAQTGTLFLFFIAIPGQVTEQQQLQTRANVTRLCQVTSTDHGRTWSSPRDLTDAAIGPAYREWSTFAVGPGHCLQLHDRARSLVVPAYAYRKLHPKQRPIPSAFCFLSHDHGRTWARGHFVAQDTLECQVAEVETGEQRVVTLNARSHLRARVQAQSTNDGLDFQESQLVKKLVEPPPQGCQGSVISFPSPRSGPGSPAQWLLYTHPTHSWQRADLGAYLNPRPPAPEAWSEPVLLAKGSAAYSDLQSMGTGPDGSPLFGCLYEANDYEEIVFLMFTLKQAFPAEYLPQ

SEQ ID NO: 51 - protein, 380 aa, Artificial Sequence
  Description of Artificial Sequence: Synthetic polypeptide
DASLPYLQKESVFQSGAHAYRIPALLYLPGQQSLLAFAEQRASKKDEHAELIVLRRGDYDAPTHQVQWQAQEVVAQARLDGHRSMNPCPLYDAQTGTLFLFFIAIPGQVTEQQQLQTRANVTRLCQVTSTDHGRTWSSPRDLTDAAIGPAYREWSTFAVGPGHCLQLHDRARSLVVPAYAYRKLHPKQRPIPSAFCFLSHDHGRTWARGHFVAQDTLECQVAEVETGEQRVVTLNARSHLRARVQAQSTNDGLDFQESQLVKKLVEPPPAGCQGSVISFPSPRSGPGSPAQWLLYTHPTHRKQRADLGAYLNPRPPAPEAWSEPVLLAKGSAAYSDLQSMGTGPDGSPLFGCLYEANDYEEIVFLMFTLKQAFPAEYLPQ

SEQ ID NO: 52 - protein, 380 aa, Artificial Sequence
  Description of Artificial Sequence: Synthetic polypeptide
DASLPYLQKESVFQSGAHAYRIPALLYLPGQQSLLAFAEQRASKKDEHAELIVLRRGDYDASTHQVQWQAQEVVAQARLDGHRSMNPCPLYDAQTGTLFLFFIAIPGQVTEQQQLQTRANVTRLCQVTSTDHGRTWSSPRDLTDAAIGPAYREWSTFAVGPGHCLQLHDRARSLVVPAYAYRKLHPKQRPIPSAFCFLSHDHGRTWARGHFVAQDTLECQVAEVETGEQRVVTLNARSHLRARVQAQSTNDGLDFQESQLVKKLVEPPPAGCQGSVISFPSPRSGPGSPAQWLLYTHPTHRKQRADLGAYLNPRPPAPEAWSEPVLLAKGSAAYSDLQSMGTGPDGSPLFGCLYEANDYEEIVFLMFTLKQAFPAEYLPQ

SEQ ID NO: 53 - protein, 380 aa, Artificial Sequence
  Description of Artificial Sequence: Synthetic polypeptide
DASLPYLQKESVFQSGAHAYRIPALLYLPGQQSLLAFAEQRASKKDEHAELIVLRRGDYDATTHQVQWQAQEVVAQARLDGHRSMNPCPLYDAQTGTLFLFFIAIPGQVTEQQQLQTRANVTRLCQVTSTDHGRTWSSPRDLTDAAIGPAYREWSTFAVGPGHCLQLHDRARSLVVPAYAYRKLHPKQRPIPSAFCFLSHDHGRTWARGHFVAQDTLECQVAEVETGEQRVVTLNARSHLRARVQAQSTNDGLDFQESQLVKKLVEPPPAGCQGSVISFPSPRSGPGSPAQWLLYTHPTHRKQRADLGAYLNPRPPAPEAWSEPVLLAKGSAAYSDLQSMGTGPDGSPLFGCLYEANDYEEIVFLMFTLKQAFPAEYLPQ

SEQ ID NO: 54 - protein, 380 aa, Artificial Sequence
  Description of Artificial Sequence: Synthetic polypeptide
DASLPYLQKESVFQSGAHAYRIPALLYLPGQQSLLAFAEQRASKKDEHAELIVLRRGDYDANTHQVQWQAQEVVAQARLDGHRSMNPCPLYDAQTGTLFLFFIAIPGQVTEQQQLQTRANVTRLCQVTSTDHGRTWSSPRDLTDAAIGPAYREWSTFAVGPGHCLQLHDRARSLVVPAYAYRKLHPKQRPIPSAFCFLSHDHGRTWARGHFVAQDTLECQVAEVETGEQRVVTLNARSHLRARVQAQSTNDGLDFQESQLVKKLVEPPPAGCQGSVISFPSPRSGPGSPAQWLLYTHPTHRKQRADLGAYLNPRPPAPEAWSEPVLLAKGSAAYSDLQSMGTGPDGSPLFGCLYEANDYEEIVFLMFTLKQAFPAEYLPQ

SEQ ID NO: 55 - protein, 379 aa, Artificial Sequence
  Description of Artificial Sequence: Synthetic polypeptide
ASLPYLQKESVFQSGAHAYRIPALLYLPGQQSLLAFAEQRASKKDEHAELIVLRRGDYDAPTHQVQWQAQEVVAQARLDGHRSMNPCPLYDAQTGTLFLFFIAIPGQVTEQQQLQTRANVTRLCQVTSTDHGRTWSSPRDLTDAAIGPAYREWSTFAVGPGHCLQLHDRARSLVVPAYAYRKLHPKQRPIPSAFCFLSHDHGRTWARGHFVAQDTLECQVAEVETGEQRVVTLNARSHLRARVQAQSTNDGLDFQESQLVKKLVEPPPQGCQGSVISFPSPRSGPGSPAQWLLYTHPTHSWQRADLGAYLNPRPPAPEAWSEPVLLAKGSCAYSDLQSMGTGPDGSPLFGCLYEANDYEEIVFLMFTLKQAFPAEYLPQ

SEQ ID NO: 56 - protein, 380 aa, Artificial Sequence
  Description of Artificial Sequence: Synthetic polypeptide
MASLPYLQKESVFQSGAHAYRIPALLYLPGQQSLLAFAEQRASKKDEHAELIVLRRGDYDAPTHQVQWQAQEVVAQARLDGHRSMNPCPLYDAQTGTLFLFFIAIPGQVTEQQQLQTRANVTRLCQVTSTDHGRTWSSPRDLTDAAIGPAYREWSTFAVGPGHCLQLHDRARSLVVPAYAYRKLHPKQRPIPSAFCFLSHDHGRTWARGHFVAQDTLECQVAEVETGEQRVVTLNARSHLRARVQAQSTNDGLDFQESQLVKKLVEPPPQGCQGSVISFPSPRSGPGSPAQWLLYTHPTHSWQRADLGAYLNPRPPAPEAWSEPVLLAKGSCAYSDLQSMGTGPDGSPLFGCLYEANDYEEIVFLMFTLKQAFPAEYLPQ

SEQ ID NO: 57 - protein, 379 aa, Artificial Sequence
  Description of Artificial Sequence: Synthetic polypeptide
ASLPYLQKESVFQSGAHAYRIPALLYLPGQQSLLAFAEQRASKKDEHAELIVLRRGDYDAPTHQVQWQAQEVVAQARLDGHRSMNPCPLYDAQTGTLFLFFIAIPGQVTEQQQLQTRANVTRLCQVTSTDHGRTWSSPRDLTDAAIGPAYREWSTFAVGPGHCLQLHDRARSLVVPAYAYRKLHPKQRPIPSAFCFLSHDHGRTWARGHFVAQDTLECQVAEVETGEQRVVTLNARSHLRARVQAQSTNDGLDFQESQLVKKLVEPPPQGCQGSVISFPSPRSGPGSPAQWLLYTHPTHSWQRADLGAYLNPRPPAPEAWSEPVLLAKGSAAYSDLQSMGTGPDGSPLFGCLYEANDYEEIVFLMFTLKQAFPAEYLPQ

SEQ ID NO: 58 - protein, 380 aa, Artificial Sequence
  Description of Artificial Sequence: Synthetic polypeptide
DASLPYLQKESVFQSGAHAYRIPALLYLPGQQSLLAFAEQRASKKDEHAELIVLRRGDYDAPTHQVQWQAQEVVAQARLDGHRSMNPCPLYDAQTGTLFLFFIAIPGQVTEQQQLQTRANVTRLCQVTSTDHGRTWSSPRDLTDAAIGPAYREWSTFAVGPGHCLQLHDRARSLVVPAYAYRKLHPKQRPIPSAFCFLSHDHGRTWARGHFVAQDTLECQVAEVETGEQRVVTLNARSHLRARVQAQSTNDGLDFQESQLVKKLVEPPPQGCQGSVISFPSPRSGPGSPAQWLLYTHPTHSWQRADLGAYLNPRPPAPEAWSEPVLLAKGSAAYSDLQSMGTGPDGSPLFGCLYEANDYEEIVFLMFTLKQAFPAEYLPQ

SEQ ID NO: 59 - protein, 380 aa, Artificial Sequence
  Description of Artificial Sequence: Synthetic polypeptide
DASLPYLQKESVFQSGAHAYRIPALLYLPGQQSLLAFAEQRASKKDEHAELIVLRRGDYDAPTHQVQWQAQEVVAQARLDGHRSMNPCPLYDAQTGTLFLFFIAIPGQVTEQQQLQTRANVTRLCQVTSTDHGRTWSSPRDLTDAAIGPAYREWSTFAVGPGHCLQLHDRARSLVVPAYAYRKLHPKQRPIPSAFCFLSHDHGRTWARGHFVAQDTLECQVAEVETGEQRVVTLNARSHLRARVQAQSTNDGLDFQESQLVKKLVEPPPQGCQGSVISFPSPRSGPGSPAQWLLYTHPTHSWQRADLGAYLNPRPPAPEAWSEPVLLAKGSCAYSDLQSMGTGPDGSPLFGCLYEANDYEEIVFLMFTLKQAFPAEYLPQ

SEQ ID NO: 60 - protein, 380 aa, Artificial Sequence
  Description of Artificial Sequence: Synthetic polypeptide
AASLPYLQKESVFQSGAHAYRIPALLYLPGQQSLLAFAEQRASKKDEHAELIVLRRGDYDAPTHQVQWQAQEVVAQARLDGHRSMNPCPLYDAQTGTLFLFFIAIPGQVTEQQQLQTRANVTRLCQVTSTDHGRTWSSPRDLTDAAIGPAYREWSTFAVGPGHCLQLHDRARSLVVPAYAYRKLHPKQRPIPSAFCFLSHDHGRTWARGHFVAQDTLECQVAEVETGEQRVVTLNARSHLRARVQAQSTNDGLDFQESQLVKKLVEPPPQGCQGSVISFPSPRSGPGSPAQWLLYTHPTHSWQRADLGAYLNPRPPAPEAWSEPVLLAKGSAAYSDLQSMGTGPDGSPLFGCLYEANDYEEIVFLMFTLKQAFPAEYLPQ

SEQ ID NO: 61 - protein, 380 aa, Artificial Sequence
  Description of Artificial Sequence: Synthetic polypeptide
MASLPYLQKESVFQSGAHAYRIPALLYLPGQQSLLAFAEQRASKKDEHAELIVLRRGDYDAPTHQVQWQAQEVVAQARLDGHRSMNPCPLYDAQTGTLFLFFIAIPGQVTEQQQLQTRANVTRLCQVTSTDHGRTWSSPRDLTDAAIGPAYREWSTFAVGPGHCLQLHDRARSLVVPAYAYRKLHPKQRPIPSAFCFLSHDHGRTWARGHFVAQDTLECQVAEVETGEQRVVTLNARSHLRARVQAQSTNDGLDFQESQLVKKLVEPPPQGCQGSVISFPSPRSGPGSPAQWLLYTHPTHSWQRADLGAYLNPRPPAPEAWSEPVLLAKGSAAYSDLQSMGTGPDGSPLFGCLYEANDYEEIVFLMFTLKQAFPAEYLPQ

SEQ ID NO: 62 - protein, 380 aa, Artificial Sequence
  Description of Artificial Sequence: Synthetic polypeptide
AASLPYLQKESVFQSGAHAYRIPALLYLPGQQSLLAFAEQRASKKDEHAELIVLRRGDYDAPTHQVQWQAQEVVAQARLDGHRSMNPCPLYDAQTGTLFLFFIAIPGQVTEQQQLQTRANVTRLCQVTSTDHGRTWSSPRDLTDAAIGPAYREWSTFAVGPGHCLQLHDRARSLVVPAYAYRKLHPKQRPIPSAFCFLSHDHGRTWARGHFVAQDTLECQVAEVETGEQRVVTLNARSHLRARVQAQSTNDGLDFQESQLVKKLVEPPPQGCQGSVISFPSPRSGPGSPAQWLLYTHPTHSWQRADLGAYLNPRPPAPEAWSEPVLLAKGSCAYSDLQSMGTGPDGSPLFGCLYEANDYEEIVFLMFTLKQAFPAEYLPQ

SEQ ID NO: 63 - protein, 450 aa, Artificial Sequence
  Description of Artificial Sequence: Synthetic polypeptide
EVQLVESGGGLVQPGGSLRLSCAASGFNIKDTYIHWVRQAPGKGLEWVARIYPTNGYTRYADSVKGRFTISADTSKNTAYLQMNSLRAEDTAVYYCSRWGGDGFYAMDYWGQGTLVTVSSASTKGPSVFPLAPSSKSTSGGTAALGCLVKDYFPEPVTVSWNSGALTSGVHTFPAVLQSSGLYSLSSVVTVPSSSLGTQTYICNVNHKPSNTKVDKKVEPKSCDKTHTCPPCPAPELLGGPSVFLFPPKPKDTLMISRTPEVTCVVVDVSHEDPEVKFNWYVDGVEVHNAKTKPREEQYNSTYRVVSVLTVLHQDWLNGKEYKCKVSNKALPAPIEKTISKAKGQPREPQVYTLPPSREEMTKNQVSLYCLVKGFYPSDIAVEWESNGQPENNYKTTPPVLDSDGSFFLYSKLTVDKSRWQQGNVFSCSVMHEALHNHYTQKSLSLSPGK

SEQ ID NO: 64 - protein, 214 aa, Artificial Sequence
  Description of Artificial Sequence: Synthetic polypeptide
DIQMTQSPSSLSASVGDRVTITCRASQDVNTAVAWYQQKPGKAPKLLIYSASFLYSGVPSRFSGSRSGTDFTLTISSLQPEDFATYYCQQHYTTPPTFGQGTKVEIKRTVAAPSVFIFPPSDEQLKSGTASVVCLLNNFYPREAKVQWKVDNALQSGNSQESVTEQDSKDSTYSLSSTLTLSKADYEKHKVYACEVTHQGLSSPVTKSFNRGEC

SEQ ID NO: 65 - protein, 242 aa, Artificial Sequence
  Description of Artificial Sequence: Synthetic polypeptide
EVQLVESGGGLVQPGGSLRLSCAASGFNIKDTYIHWVRQAPGKGLEWVARIYPTNGYTRYADSVKGRFTISADTSKNTAYLQMNSLRAEDTAVYYCSRWGGDGFYAMDYWGQGTLVTVSSGGGGSGGGGSGGGGSDIQMTQSPSSLSASVGDRVTITCRASQDVNTAVAWYQQKPGKAPKLLIYSASFLYSGVPSRFSGSRSGTDFTLTISSLQPEDFATYYCQQHYTTPPTFGQGTKVEIK

SEQ ID NO: 66 - protein, 214 aa, Artificial Sequence; identical to SEQ ID NO: 64
  Description of Artificial Sequence: Synthetic polypeptide

SEQ ID NO: 67 - protein, 450 aa, Artificial Sequence; identical to SEQ ID NO: 63
  Description of Artificial Sequence: Synthetic polypeptide

SEQ ID NO: 68 - protein, 617 aa, Artificial Sequence
  Description of Artificial Sequence: Synthetic polypeptide
DASLPYLQKESVFQSGAHAYRIPALLYLPGQQSLLAFAEQRASKKDEHAELIVLRRGDYDAGTHQVQWQAQEVVAQARLDGHRSMNPCPLYDEQTGTLFLFFIAIPGQVTEQQQLQTRANVTRLCQVTSTDHGRTWSSPRDLTDAAIGPAYREWSTFAVGPGHCLQLHDRARSLVVPAYAYRKLHPKQRPIPSAFCFLSHDHGRTWARGHFVAQDTLECQVAEVETGEQRVVTLNARSHLRARVQAQSTNDGLDFQESQLVKKLVEPPPQGCQGSVISFPSPRSGPGSPAQWLLYTHPTHSWQRADLGAYLNPRPPAPEAWSEPVLLAKGSAAYSDLQSMGTGPDGSPLFGCLYEANDYEEIVFLMFTLKQAFPAEYLPQGGGGSGGGGSDKTHTCPPCPAPELLGGPSVFLFPPKPKDTLMISRTPEVTCVVVDVSHEDPEVKFNWYVDGVEVHNAKTKPREEQYNSTYRVVSVLTVLHQDWLNGKEYKCKVSNKALPAPIEKTISKAKGQPREPQVYTLPPSREEMTKNQVSLTCLVKGFYPSDIAVEWESNGQPENNYKTTPPVLDSDGSFFLTSKLTVDKSRWQQGNVFSCSVMHEALHNHYTQKSLSLSPGK

SEQ ID NO: 69 - protein, 617 aa, Artificial Sequence
  Description of Artificial Sequence: Synthetic polypeptide
DASLPYLQDESVFQSGAHAYRIPALLYLPGQQSLLAFAEQRASKKDEHAELIVLRRGDYDAPTHQVQWQAQEVVAQARLDGHRSMNPCPLYDEQTGTLFLFFIAIPGQVTEQQQLQTRANVTRLCQVTSTDHGRTWSSPRDLTDAAIGPAYREWSTFAVGPGHCLQLHDRARSLVVPAYAYRKLHPKQRPIPSAFCFLSHDHGRTWARGHFVAQDTLECQVAEVETGEQRVVTLNARSHLRARVQAQSTNDGLDFQESQLVKKLVEPPPQGCQGSVISFPSPRSGPGSPAQWLLYTHPTHSWQRADLGAYLNPRPPAPEAWSEPVLLAKGSAAYSDLQSMGTGPDGSPLFGCLYEANDYEEIRFIMFTLKQAFPAEYLPQGGGGSGGGGSDKTHTCPPCPAPELLGGPSVFLFPPKPKDTLMISRTPEVTCVVVDVSHEDPEVKFNWYVDGVEVHNAKTKPREEQYNSTYRVVSVLTVLHQDWLNGKEYKCKVSNKALPAPIEKTISKAKGQPREPQVYTLPPSREEMTKNQVSLTCLVKGFYPSDIAVEWESNGQPENNYKTTPPVLDSDGSFFLTSKLTVDKSRWQQGNVFSCSVMHEALHNHYTQKSLSLSPGK

SEQ ID NO: 70 - protein, 617 aa, Artificial Sequence
  Description of Artificial Sequence: Synthetic polypeptide
DASLPYLQKESVFQSGAHAYRIPALLYLPGQQSLLAFAEQRASKKDEHAELIVLRRGDYDANTHQVQWQAQEVVAQARLDGHRSMNPCPLYDAQTGTLFLFFIAIPGQVTEQQQLQTRANVTRLCQVTSTDHGRTWSSPRDLTDAAIGPAYREWSTFAVGPGHCLQLHDRARSLVVPAYAYRKLHPKQRPIPSAFCFLSHDHGRTWARGHFVAQDTLECQVAEVETGEQRVVTLNARSHLRARVQAQSTNDGLDFQESQLVKKLVEPPPQGCQGSVISFPSPRSGPGSPAQWLLYTHPTHSWQRADLGAYLNPRPPAPEAWSEPVLLAKGSAAYSDLQSMGTGPDGSPLFGCLYEANDYEEIVFLMFTLKQAFPAEYLPQGGGGSGGGGSDKTHTCPPCPAPELLGGPSVFLFPPKPKDTLMISRTPEVTCVVVDVSHEDPEVKFNWYVDGVEVHNAKTKPREEQYNSTYRVVSVLTVLHQDWLNGKEYKCKVSNKALPAPIEKTISKAKGQPREPQVYTLPPSREEMTKNQVSLTCLVKGFYPSDIAVEWESNGQPENNYKTTPPVLDSDGSFFLTSKLTVDKSRWQQGNVFSCSVMHEALHNHYTQKSLSLSPGK

SEQ ID NO: 71 - protein, 617 aa, Artificial Sequence
  Description of Artificial Sequence: Synthetic polypeptide
DASLPYLQKESVFQSGAHAYRIPALLYLPGQQSLLAFAEQRASKKDEHAELIVLRRGDYDAPTHQVQWQAQEVVAQARLDGHRSMNPCPLYDAQTGTLFLFFIAIPGQVTEQQQLQTRANVTRLCQVTSTDHGRTWSSPRDLTDAAIGPAYREWSTFAVGPGHCLQLHDRARSLVVPAYAYRKLHPKQRPIPSAFCFLSHDHGRTWARGHFVAQDTLECQVAEVETGEQRVVTLNARSHLRARVQAQSTNDGLDFQESQLVKKLVEPPPAGCQGSVISFPSPRSGPGSPAQWLLYTHPTHRKQRADLGAYLNPRPPAPEAWSEPVLLAKGSAAYSDLQSMGTGPDGSPLFGCLYEANDYEEIVFLMFTLKQAFPAEYLPQGGGGSGGGGSDKTHTCPPCPAPELLGGPSVFLFPPKPKDTLMISRTPEVTCVVVDVSHEDPEVKFNWYVDGVEVHNAKTKPREEQYNSTYRVVSVLTVLHQDWLNGKEYKCKVSNKALPAPIEKTISKAKGQPREPQVYTLPPSREEMTKNQVSLTCLVKGFYPSDIAVEWESNGQPENNYKTTPPVLDSDGSFFLTSKLTVDKSRWQQGNVFSCSVMHEALHNHYTQKSLSLSPGK

SEQ ID NO: 72 - protein, 617 aa, Artificial Sequence
  Description of Artificial Sequence: Synthetic polypeptide
DASLPYLQKESVFQSGAHAYRIPALLYLPGQQSLLAFAEQRASKKDEHAELIVLRRGDYDASTHQVQWQAQEVVAQARLDGHRSMNPCPLYDAQTGTLFLFFIAIPGQVTEQQQLQTRANVTRLCQVTSTDHGRTWSSPRDLTDAAIGPAYREWSTFAVGPGHCLQLHDRARSLVVPAYAYRKLHPKQRPIPSAFCFLSHDHGRTWARGHFVAQDTLECQVAEVETGEQRVVTLNARSHLRARVQAQSTNDGLDFQESQLVKKLVEPPPAGCQGSVISFPSPRSGPGSPAQWLLYTHPTHRKQRADLGAYLNPRPPAPEAWSEPVLLAKGSAAYSDLQSMGTGPDGSPLFGCLYEANDYEEIVFLMFTLKQAFPAEYLPQGGGGSGGGGSDKTHTCPPCPAPELLGGPSVFLFPPKPKDTLMISRTPEVTCVVVDVSHEDPEVKFNWYVDGVEVHNAKTKPREEQYNSTYRVVSVLTVLHQDWLNGKEYKCKVSNKALPAPIEKTISKAKGQPREPQVYTLPPSREEMTKNQVSLTCLVKGFYPSDIAVEWESNGQPENNYKTTPPVLDSDGSFFLTSKLTVDKSRWQQGNVFSCSVMHEALHNHYTQKSLSLSPGK

SEQ ID NO: 73 - protein, 617 aa, Artificial Sequence
  Description of Artificial Sequence: Synthetic polypeptide
DASLPYLQKESVFQSGAHAYRIPALLYLPGQQSLLAFAEQRASKKDEHAELIVLRRGDYDATTHQVQWQAQEVVAQARLDGHRSMNPCPLYDAQTGTLFLFFIAIPGQVTEQQQLQTRANVTRLCQVTSTDHGRTWSSPRDLTDAAIGPAYREWSTFAVGPGHCLQLHDRARSLVVPAYAYRKLHPKQRPIPSAFCFLSHDHGRTWARGHFVAQDTLECQVAEVETGEQRVVTLNARSHLRARVQAQSTNDGLDFQESQLVKKLVEPPPAGCQGSVISFPSPRSGPGSPAQWLLYTHPTHRKQRADLGAYLNPRPPAPEAWSEPVLLAKGSAAYSDLQSMGTGPDGSPLFGCLYEANDYEEIVFLMFTLKQAFPAEYLPQGGGGSGGGGSDKTHTCPPCPAPELLGGPSVFLFPPKPKDTLMISRTPEVTCVVVDVSHEDPEVKFNWYVDGVEVHNAKTKPREEQYNSTYRVVSVLTVLHQDWLNGKEYKCKVSNKALPAPIEKTISKAKGQPREPQVYTLPPSREEMTKNQVSLTCLVKGFYPSDIAVEWESNGQPENNYKTTPPVLDSDGSFFLTSKLTVDKSRWQQGNVFSCSVMHEALHNHYTQKSLSLSPGK

SEQ ID NO: 74 - protein, 617 aa, Artificial Sequence
  Description of Artificial Sequence: Synthetic polypeptide
DASLPYLQKESVFQSGAHAYRIPALLYLPGQQSLLAFAEQRASKKDEHAELIVLRRGDYDANTHQVQWQAQEVVAQARLDGHRSMNPCPLYDAQTGTLFLFFIAIPGQVTEQQQLQTRANVTRLCQVTSTDHGRTWSSPRDLTDAAIGPAYREWSTFAVGPGHCLQLHDRARSLVVPAYAYRKLHPKQRPIPSAFCFLSHDHGRTWARGHFVAQDTLECQVAEVETGEQRVVTLNARSHLRARVQAQSTNDGLDFQESQLVKKLVEPPPAGCQGSVISFPSPRSGPGSPAQWLLYTHPTHRKQRADLGAYLNPRPPAPEAWSEPVLLAKGSAAYSDLQSMGTGPDGSPLFGCLYEANDYEEIVFLMFTLKQAFPAEYLPQGGGGSGGGGSDKTHTCPPCPAPELLGGPSVFLFPPKPKDTLMISRTPEVTCVVVDVSHEDPEVKFNWYVDGVEVHNAKTKPREEQYNSTYRVVSVLTVLHQDWLNGKEYKCKVSNKALPAPIEKTISKAKGQPREPQVYTLPPSREEMTKNQVSLTCLVKGFYPSDIAVEWESNGQPENNYKTTPPVLDSDGSFFLTSKLTVDKSRWQQGNVFSCSVMHEALHNHYTQKSLSLSPGK

SEQ ID NO: 75 - protein, 617 aa, Artificial Sequence
  Description of Artificial Sequence: Synthetic polypeptide
  MOD_RES (1)..(1): Ala, Arg, Asn, Asp, Gln, Glu, Gly, His, Leu, Lys, Met, Phe, Thr, Val, or not present
  MOD_RES (6)..(6): Phe, Trp, Tyr or Val
  MOD_RES (9)..(9): Lys or Asp
  MOD_RES (62)..(62): Pro, Asn, Asp, His, Glu, Gly, Ser or Thr
  MOD_RES (93)..(93): Ala, Glu, or Lys
  MOD_RES (187)..(187): Arg, Ile, or Lys
  MOD_RES (270)..(270): Gln, Ala, His, Phe, or Pro
  MOD_RES (301)..(301): Ser or Arg
  MOD_RES (302)..(302): Trp or Lys
  MOD_RES (332)..(332): Ala, Cys, Ser, or Val
  MOD_RES (363)..(363): Val or Arg
  MOD_RES (365)..(365): Leu, Gln, His, Ile, Lys, or Ser
  See specification as filed for detailed description of substitutions and preferred embodiments
XASLPXLQXESVFQSGAHAYRIPALLYLPGQQSLLAFAEQRASKKDEHAELIVLRRGDYDAXTHQVQWQAQEVVAQARLDGHRSMNPCPLYDXQTGTLFLFFIAIPGQVTEQQQLQTRANVTRLCQVTSTDHGRTWSSPRDLTDAAIGPAYREWSTFAVGPGHCLQLHDRARSLVVPAYAYRKLHPXQRPIPSAFCFLSHDHGRTWARGHFVAQDTLECQVAEVETGEQRVVTLNARSHLRARVQAQSTNDGLDFQESQLVKKLVEPPPXGCQGSVISFPSPRSGPGSPAQWLLYTHPTHXXQRADLGAYLNPRPPAPEAWSEPVLLAKGSXAYSDLQSMGTGPDGSPLFGCLYEANDYEEIXFXMFTLKQAFPAEYLPQGGGGSGGGGSDKTHTCPPCPAPELLGGPSVFLFPPKPKDTLMISRTPEVTCVVVDVSHEDPEVKFNWYVDGVEVHNAKTKPREEQYNSTYRVVSVLTVLHQDWLNGKEYKCKVSNKALPAPIEKTISKAKGQPREPQVYTLPPSREEMTKNQVSLTCLVKGFYPSDIAVEWESNGQPENNYKTTPPVLDSDGSFFLTSKLTVDKSRWQQGNVFSCSVMHEALHNHYTQKSLSLSPGK

SEQ ID NO: 76 - protein, 617 aa, Artificial Sequence
  Description of Artificial Sequence: Synthetic polypeptide
  MOD_RES (1)..(1): Ala, Arg, Asn, Asp, Gln, Glu, Gly, His, Leu, Lys, Met, Phe, Thr, Val, or not present
  MOD_RES (2)..(2): Ala or Lys
  MOD_RES (4)..(4): Asn or Leu
  MOD_RES (5)..(5): Pro or His
  MOD_RES (6)..(6): Phe, Trp, Tyr or Val
  MOD_RES (9)..(9): Lys or Asp
  MOD_RES (44)..(44): Lys, Arg, or Glu
  MOD_RES (45)..(45): Lys, Ala, Arg, or Glu
  MOD_RES (54)..(54): Leu or Met
  MOD_RES (62)..(62): Pro, Asn, Asp, His, Glu, Gly, Ser or Thr
  MOD_RES (69)..(69): Gln or His
  MOD_RES (78)..(78): Arg or Lys
  MOD_RES (93)..(93): Ala, Glu or Lys
  MOD_RES (107)..(107): Gly or Asp
  MOD_RES (108)..(108): Gln or His
  MOD_RES (112)..(112): Gln, Arg, or Lys
  MOD_RES (125)..(125): Ala, Cys, Ile, Ser, Val, or Leu
  MOD_RES (126)..(126): Gln or Leu
  MOD_RES (150)..(150): Ala or Val
  MOD_RES (164)..(164): Cys or Gly
  MOD_RES (171)..(171): Ala or Gly
  MOD_RES (187)..(187): Arg, Ile, or Lys
  MOD_RES (196)..(196): Ala, Cys, Leu, or Val
  MOD_RES (217)..(217): Leu, Ala, or Val
  MOD_RES (249)..(249): Thr or Ala
  MOD_RES (251)..(251): Asp or Gly
  MOD_RES (257)..(257): Glu or Lys
  MOD_RES (270)..(270): Gln, Ala, His, Phe, or Pro
  MOD_RES (272)..(272): Cys or Val
  MOD_RES (292)..(292): Trp or Arg
  MOD_RES (301)..(301): Ser or Arg
  MOD_RES (302)..(302): Trp or Lys
  MOD_RES (325)..(325): Lys or Val
  MOD_RES (332)..(332): Ala, Cys, Ser, or Val
  MOD_RES (352)..(352): Cys, Leu, or Val
  MOD_RES (363)..(363): Val or Arg
  MOD_RES (365)..(365): Leu, Gln, His, Ile, Lys, or Ser
  See specification as filed for detailed description of substitutions and preferred embodiments
XXSXXXLQXESVFQSGAHAYRIPALLYLPGQQSLLAFAEQRASXXDEHAELIVXRRGDYDAXTHQVQWXAQEVVAQAXLDGHRSMNPCPLYDXQTGTLFLFFIAIPXXVTEXQQLQTRANVTRLXXVTSTDHGRTWSSPRDLTDAAIGPXYREWSTFAVGPGHXLQLHDRXRSLVVPAYAYRKLHPXQRPIPSAFXFLSHDHGRTWARGHFVAQDTXECQVAEVETGEQRVVTLNARSHLRARVQAQSXNXGLDFQXSQLVKKLVEPPPXGXQGSVISFPSPRSGPGSPAQXLLYTHPTHXXQRADLGAYLNPRPPAPEAWSEPXLLAKGSXAYSDLQSMGTGPDGSPLFGXLYEANDYEEIXFXMFTLKQAFPAEYLPQGGGGSGGGGSDKTHTCPPCPAPELLGGPSVFLFPPKPKDTLMISRTPEVTCVVVDVSHEDPEVKFNWYVDGVEVHNAKTKPREEQYNSTYRVVSVLTVLHQDWLNGKEYKCKVSNKALPAPIEKTISKAKGQPREPQVYTLPPSREEMTKNQVSLTCLVKGFYPSDIAVEWESNGQPENNYKTTPPVLDSDGSFFLTSKLTVDKSRWQQGNVFSCSVMHEALHNHYTQKSLSLSPGK

SEQ ID NO: 77 - protein, 874 aa, Artificial Sequence
  Description of Artificial Sequence: Synthetic polypeptide
DASLPYLQKESVFQSGAHAYRIPALLYLPGQQSLLAFAEQRASKKDEHAELIVLRRGDYDAGTHQVQWQAQEVVAQARLDGHRSMNPCPLYDEQTGTLFLFFIAIPGQVTEQQQLQTRANVTRLCQVTSTDHGRTWSSPRDLTDAAIGPAYREWSTFAVGPGHCLQLHDRARSLVVPAYAYRKLHPKQRPIPSAFCFLSHDHGRTWARGHFVAQDTLECQVAEVETGEQRVVTLNARSHLRARVQAQSTNDGLDFQESQLVKKLVEPPPQGCQGSVISFPSPRSGPGSPAQWLLYTHPTHSWQRADLGAYLNPRPPAPEAWSEPVLLAKGSAAYSDLQSMGTGPDGSPLFGCLYEANDYEEIVFLMFTLKQAFPAEYLPQGGGGSGGGGSDKTHTCPPCPAPELLGGPSVFLFPPKPKDTLMISRTPEVTCVVVDVSHEDPEVKFNWYVDGVEVHNAKTKPREEQYNSTYRVVSVLTVLHQDWLNGKEYKCKVSNKALPAPIEKTISKAKGQPREPQVYTLPPSREEMTKNQVSLTCLVKGFYPSDIAVEWESNGQPENNYKTTPPVLDSDGSFFLYSKLTVDKSRWQQGNVFSCSVMHEALHNHYTQKSLSLSPGKGGGGSGGGGSGGGGSEVQLVESGGGLVQPGGSLRLSCAASGFNIKDTYIHWVRQAPGKGLEWVARIYPTNGYTRYADSVKGRFTISADTSKNTAYLQMNSLRAEDTAVYYCSRWGGDGFYAMDYWGQGTLVTVSSGGGGSGGGGSGGGGSDIQMTQSPSSLSASVGDRVTITCRASQDVNTAVAWYQQKPGKAPKLLIYSASFLYSGVPSRFSGSRSGTDFTLTISSLQPEDFATYYCQQHYTTPPTFGQGTKVEIK

SEQ ID NO: 78 - protein, 874 aa, Artificial Sequence
  Description of Artificial Sequence: Synthetic polypeptide
DASLPYLQDESVFQSGAHAYRIPALLYLPGQQSLLAFAEQRASKKDEHAELIVLRRGDYDAPTHQVQWQAQEVVAQARLDGHRSMNPCPLYDEQTGTLFLFFIAIPGQVTEQQQLQTRANVTRLCQVTSTDHGRTWSSPRDLTDAAIGPAYREWSTFAVGPGHCLQLHDRARSLVVPAYAYRKLHPKQRPIPSAFCFLSHDHGRTWARGHFVAQDTLECQVAEVETGEQRVVTLNARSHLRARVQAQSTNDGLDFQESQLVKKLVEPPPQGCQGSVISFPSPRSGPGSPAQWLLYTHPTHSWQRADLGAYLNPRPPAPEAWSEPVLLAKGSAAYSDLQSMGTGPDGSPLFGCLYEANDYEEIRFIMFTLKQAFPAEYLPQGGGGSGGGGSDKTHTCPPCPAPELLGGPSVFLFPPKPKDTLMISRTPEVTCVVVDVSHEDPEVKFNWYVDGVEVHNAKTKPREEQYNSTYRVVSVLTVLHQDWLNGKEYKCKVSNKALPAPIEKTISKAKGQPREPQVYTLPPSREEMTKNQVSLTCLVKGFYPSDIAVEWESNGQPENNYKTTPPVLDSDGSFFLYSKLTVDKSRWQQGNVFSCSVMHEALHNHYTQKSLSLSPGKGGGGSGGGGSGGGGSEVQLVESGGGLVQPGGSLRLSCAASGFNIKDTYIHWVRQAPGKGLEWVARIYPTNGYTRYADSVKGRFTISADTSKNTAYLQMNSLRAEDTAVYYCSRWGGDGFYAMDYWGQGTLVTVSSGGGGSGGGGSGGGGSDIQMTQSPSSLSASVGDRVTITCRASQDVNTAVAWYQQKPGKAPKLLIYSASFLYSGVPSRFSGSRSGTDFTLTISSLQPEDFATYYCQQHYTTPPTFGQGTKVEIK

SEQ ID NO: 79 - protein, 874 aa, Artificial Sequence
  Description of Artificial Sequence: Synthetic polypeptide
DASLPYLQKESVFQSGAHAYRIPALLYLPGQQSLLAFAEQRASKKDEHAELIVLRRGDYDANTHQVQWQAQEVVAQARLDGHRSMNPCPLYDAQTGTLFLFFIAIPGQVTEQQQLQTRANVTRLCQVTSTDHGRTWSSPRDLTDAAIGPAYREWSTFAVGPGHCLQLHDRARSLVVPAYAYRKLHPKQRPIPSAFCFLSHDHGRTWARGHFVAQDTLECQVAEVETGEQRVVTLNARSHLRARVQAQSTNDGLDFQESQLVKKLVEPPPQGCQGSVISFPSPRSGPGSPAQWLLYTHPTHSWQRADLGAYLNPRPPAPEAWSEPVLLAKGSAAYSDLQSMGTGPDGSPLFGCLYEANDYEEIVFLMFTLKQAFPAEYLPQGGGGSGGGGSDKTHTCPPCPAPELLGGPSVFLFPPKPKDTLMISRTPEVTCVVVDVSHEDPEVKFNWYVDGVEVHNAKTKPREEQYNSTYRVVSVLTVLHQDWLNGKEYKCKVSNKALPAPIEKTISKAKGQPREPQVYTLPPSREEMTKNQVSLTCLVKGFYPSDIAVEWESNGQPENNYKTTPPVLDSDGSFFLYSKLTVDKSRWQQGNVFSCSVMHEALHNHYTQKSLSLSPGKGGGGSGGGGSGGGGSEVQLVESGGGLVQPGGSLRLSCAASGFNIKDTYIHWVRQAPGKGLEWVARIYPTNGYTRYADSVKGRFTISADTSKNTAYLQMNSLRAEDTAVYYCSRWGGDGFYAMDYWGQGTLVTVSSGGGGSGGGGSGGGGSDIQMTQSPSSLSASVGDRVTITCRASQDVNTAVAWYQQKPGKAPKLLIYSASFLYSGVPSRFSGSRSGTDFTLTISSLQPEDFATYYCQQHYTTPPTFGQGTKVEIK

SEQ ID NO: 80 - protein, 874 aa, Artificial Sequence
  Description of Artificial Sequence: Synthetic polypeptide
DASLPYLQKESVFQSGAHAYRIPALLYLPGQQSLLAFAEQRASKKDEHAELIVLRRGDYDAPTHQVQWQAQEVVAQARLDGHRSMNPCPLYDAQTGTLFLFFIAIPGQVTEQQQLQTRANVTRLCQVTSTDHGRTWSSPRDLTDAAIGPAYREWSTFAVGPGHCLQLHDRARSLVVPAYAYRKLHPKQRPIPSAFCFLSHDHGRTWARGHFVAQDTLECQVAEVETGEQRVVTLNARSHLRARVQAQSTNDGLDFQESQLVKKLVEPPPAGCQGSVISFPSPRSGPGSPAQWLLYTHPTHRKQRADLGAYLNPRPPAPEAWSEPVLLAKGSAAYSDLQSMGTGPDGSPLFGCLYEANDYEEIVFLMFTLKQAFPAEYLPQGGGGSGGGGSDKTHTCPPCPAPELLGGPSVFLFPPKPKDTLMISRTPEVTCVVVDVSHEDPEVKFNWYVDGVEVHNAKTKPREEQYNSTYRVVSVLTVLHQDWLNGKEYKCKVSNKALPAPIEKTISKAKGQPREPQVYTLPPSREEMTKNQVSLTCLVKGFYPSDIAVEWESNGQPENNYKTTPPVLDSDGSFFLYSKLTVDKSRWQQGNVFSCSVMHEALHNHYTQKSLSLSPGKGGGGSGGGGSGGGGSEVQLVESGGGLVQPGGSLRLSCAASGFNIKDTYIHWVRQAPGKGLEWVARIYPTNGYTRYADSVKGRFTISADTSKNTAYLQMNSLRAEDTAVYYCSRWGGDGFYAMDYWGQGTLVTVSSGGGGSGGGGSGGGGSDIQMTQSPSSLSASVGDRVTITCRASQDVNTAVAWYQQKPGKAPKLLIYSASFLYSGVPSRFSGSRSGTDFTLTISSLQPEDFATYYCQQHYTTPPTFGQGTKVEIK

SEQ ID NO: 81 - protein, 874 aa, Artificial Sequence
  Description of Artificial Sequence: Synthetic polypeptide
DASLPYLQKESVFQSGAHAYRIPALLYLPGQQSLLAFAEQRASKKDEHAELIVLRRGDYDASTHQVQWQAQEVVAQARLDGHRSMNPCPLYDAQTGTLFLFFIAIPGQVTEQQQLQTRANVTRLCQVTSTDHGRTWSSPRDLTDAAIGPAYREWSTFAVGPGHCLQLHDRARSLVVPAYAYRKLHPKQRPIPSAFCFLSHDHGRTWARGHFVAQDTLECQVAEVETGEQRVVTLNARSHLRARVQAQSTNDGLDFQESQLVKKLVEPPPAGCQGSVISFPSPRSGPGSPAQWLLYTHPTHRKQRADLGAYLNPRPPAPEAWSEPVLLAKGSAAYSDLQSMGTGPDGSPLFGCLYEANDYEEIVFLMFTLKQAFPAEYLPQGGGGSGGGGSDKTHTCPPCPAPELLGGPSVFLFPPKPKDTLMISRTPEVTCVVVDVSHEDPEVKFNWYVDGVEVHNAKTKPREEQYNSTYRVVSVLTVLHQDWLNGKEYKCKVSNKALPAPIEKTISKAKGQPREPQVYTLPPSREEMTKNQVSLTCLVKGFYPSDIAVEWESNGQPENNYKTTPPVLDSDGSFFLYSKLTVDKSRWQQGNVFSCSVMHEALHNHYTQKSLSLSPGKGGGGSGGGGSGGGGSEVQLVESGGGLVQPGGSLRLSCAASGFNIKDTYIHWVRQAPGKGLEWVARIYPTNGYTRYADSVKGRFTISADTSKNTAYLQMNSLRAEDTAVYYCSRWGGDGFYAMDYWGQGTLVTVSSGGGGSGGGGSGGGGSDIQMTQSPSSLSASVGDRVTITCRASQDVNTAVAWYQQKPGKAPKLLIYSASFLYSGVPSRFSGSRSGTDFTLTISSLQPEDFATYYCQQHYTTPPTFGQGTKVEIK

SEQ ID NO: 82 - protein, 874 aa, Artificial Sequence
  Description of Artificial Sequence: Synthetic polypeptide
DASLPYLQKESVFQSGAHAYRIPALLYLPGQQSLLAFAEQRASKKDEHAELIVLRRGDYDATTHQVQWQAQEVVAQARLDGHRSMNPCPLYDAQTGTLFLFFIAIPGQVTEQQQLQTRANVTRLCQVTSTDHGRTWSSPRDLTDAAIGPAYREWSTFAVGPGHCLQLHDRARSLVVPAYAYRKLHPKQRPIPSAFCFLSHDHGRTWARGHFVAQDTLECQVAEVETGEQRVVTLNARSHLRARVQAQSTNDGLDFQESQLVKKLVEPPPAGCQGSVISFPSPRSGPGSPAQWLLYTHPTHRKQRADLGAYLNPRPPAPEAWSEPVLLAKGSAAYSDLQSMGTGPDGSPLFGCLYEANDYEEIVFLMFTLKQAFPAEYLPQGGGGSGGGGSDKTHTCPPCPAPELLGGPSVFLFPPKPKDTLMISRTPEVTCVVVDVSHEDPEVKFNWYVDGVEVHNAKTKPREEQYNSTYRVVSVLTVLHQDWLNGKEYKCKVSNKALPAPIEKTISKAKGQPREPQVYTLPPSREEMTKNQVSLTCLVKGFYPSDIAVEWESNGQPENNYKTTPPVLDSDGSFFLYSKLTVDKSRWQQGNVFSCSVMHEALHNHYTQKSLSLSPGKGGGGSGGGGSGGGGSEVQLVESGGGLVQPGGSLRLSCAASGFNIKDTYIHWVRQAPGKGLEWVARIYPTNGYTRYADSVKGRFTISADTSKNTAYLQMNSLRAEDTAVYYCSRWGGDGFYAMDYWGQGTLVTVSSGGGGSGGGGSGGGGSDIQMTQSPSSLSASVGDRVTITCRASQDVNTAVAWYQQKPGKAPKLLIYSASFLYSGVPSRFSGSRSGTDFTLTISSLQPEDFATYYCQQHYTTPPTFGQGTKVEIK

SEQ ID NO: 83 - protein, 874 aa, Artificial Sequence
  Description of Artificial Sequence: Synthetic polypeptide
DASLPYLQKESVFQSGAHAYRIPALLYLPGQQSLLAFAEQRASKKDEHAELIVLRRGDYDANTHQVQWQAQEVVAQARLDGHRSMNPCPLYDAQTGTLFLFFIAIPGQVTEQQQLQTRANVTRLCQVTSTDHGRTWSSPRDLTDAAIGPAYREWSTFAVGPGHCLQLHDRARSLVVPAYAYRKLHPKQRPIPSAFCFLSHDHGRTWARGHFVAQDTLECQVAEVETGEQRVVTLNARSHLRARVQAQSTNDGLDFQESQLVKKLVEPPPAGCQGSVISFPSPRSGPGSPAQWLLYTHPTHRKQRADLGAYLNPRPPAPEAWSEPVLLAKGSAAYSDLQSMGTGPDGSPLFGCLYEANDYEEIVFLMFTLKQAFPAEYLPQGGGGSGGGGSDKTHTCPPCPAPELLGGPSVFLFPPKPKDTLMISRTPEVTCVVVDVSHEDPEVKFNWYVDGVEVHNAKTKPREEQYNSTYRVVSVLTVLHQDWLNGKEYKCKVSNKALPAPIEKTISKAKGQPREPQVYTLPPSREEMTKNQVSLTCLVKGFYPSDIAVEWESNGQPENNYKTTPPVLDSDGSFFLYSKLTVDKSRWQQGNVFSCSVMHEALHNHYTQKSLSLSPGKGGGGSGGGGSGGGGSEVQLVESGGGLVQPGGSLRLSCAASGFNIKDTYIHWVRQAPGKGLEWVARIYPTNGYTRYADSVKGRFTISADTSKNTAYLQMNSLRAEDTAVYYCSRWGGDGFYAMDYWGQGTLVTVSSGGGGSGGGGSGGGGSDIQMTQSPSSLSASVGDRVTITCRASQDVNTAVAWYQQKPGKAPKLLIYSASFLYSGVPSRFSGSRSGTDFTLTISSLQPEDFATYYCQQHYTTPPTFGQGTKVEIK

SEQ ID NO: 84 - protein, 874 aa, Artificial Sequence
  Description of Artificial Sequence: Synthetic polypeptide
  MOD_RES (1)..(1): Ala, Arg, Asn, Asp, Gln, Glu, Gly, His, Leu, Lys, Met, Phe, Thr, Val, or not present
  MOD_RES (6)..(6): Phe, Trp, Tyr or Val
  MOD_RES (9)..(9): Lys or Asp
  MOD_RES (62)..(62): Pro, Asn, Asp, His, Glu, Gly, Ser or Thr
  MOD_RES (93)..(93): Ala, Glu, or Lys
  MOD_RES (187)..(187): Arg, Ile, or Lys
  MOD_RES (270)..(270): Gln, Ala, His, Phe, or Pro
  MOD_RES (301)..(301): Ser or Arg
  MOD_RES (302)..(302): Trp or Lys
  MOD_RES (332)..(332): Ala, Cys, Ser, or Val
  MOD_RES (363)..(363): Val or Arg
  MOD_RES (365)..(365): Leu, Gln, His, Ile, Lys, or Ser
  See specification as filed for detailed description of substitutions and preferred embodiments
XASLPXLQXESVFQSGAHAYRIPALLYLPGQQSLLAFAEQRASKKDEHAELIVLRRGDYDAXTHQVQWQAQEVVAQARLDGHRSMNPCPLYDXQTGTLFLFFIAIPGQVTEQQQLQTRANVTRLCQVTSTDHGRTWSSPRDLTDAAIGPAYREWSTFAVGPGHCLQLHDRARSLVVPAYAYRKLHPXQRPIPSAFCFLSHDHGRTWARGHFVAQDTLECQVAEVETGEQRVVTLNARSHLRARVQAQSTNDGLDFQESQLVKKLVEPPPXGCQGSVISFPSPRSGPGSPAQWLLYTHPTHXXQRADLGAYLNPRPPAPEAWSEPVLLAKGSXAYSDLQSMGTGPDGSPLFGCLYEANDYEEIXFXMFTLKQAFPAEYLPQGGGGSGGGGSDKTHTCPPCPAPELLGGPSVFLFPPKPKDTLMISRTPEVTCVVVDVSHEDPEVKFNWYVDGVEVHNAKTKPREEQYNSTYRVVSVLTVLHQDWLNGKEYKCKVSNKALPAPIEKTISKAKGQPREPQVYTLPPSREEMTKNQVSLTCLVKGFYPSDIAVEWESNGQPENNYKTTPPVLDSDGSFFLYSKLTVDKSRWQQGNVFSCSVMHEALHNHYTQKSLSLSPGKGGGGSGGGGSGGGGSEVQLVESGGGLVQPGGSLRLSCAASGFNIKDTYIHWVRQAPGKGLEWVARIYPTNGYTRYADSVKGRFTISADTSKNTAYLQMNSLRAEDTAVYYCSRWGGDGFYAMDYWGQGTLVTVSSGGGGSGGGGSGGGGSDIQMTQSPSSLSASVGDRVTITCRASQDVNTAVAWYQQKPGKAPKLLIYSASFLYSGVPSRFSGSRSGTDFTLTISSLQPEDFATYYCQQHYTTPPTFGQGTKVEIK

SEQ ID NO: 85 - protein, 874 aa, Artificial Sequence
  Description of Artificial Sequence: Synthetic polypeptide
  MOD_RES (1)..(1): Ala, Arg, Asn, Asp, Gln, Glu, Gly, His, Leu, Lys, Met, Phe, Thr, Val, or not present
  MOD_RES (2)..(2): Ala or Lys
  MOD_RES (4)..(4): Asn or Leu
  MOD_RES (5)..(5): Pro or His
  MOD_RES (6)..(6): Phe, Trp, Tyr or Val
  MOD_RES (9)..(9): Lys or Asp
  MOD_RES (44)..(44): Lys, Arg, or Glu
  MOD_RES (45)..(45): Lys, Ala, Arg, or Glu
  MOD_RES (54)..(54): Leu or Met
  MOD_RES (62)..(62): Pro, Asn, Asp, His, Glu, Gly, Ser or Thr
  MOD_RES (69)..(69): Gln or His
  MOD_RES (78)..(78): Arg or Lys
  MOD_RES (93)..(93): Ala, Glu or Lys
  MOD_RES (107)..(107): Gly or Asp
  MOD_RES (108)..(108): Gln or His
  MOD_RES (112)..(112): Gln, Arg, or Lys
  MOD_RES (125)..(125): Ala, Cys, Ile, Ser, Val, or Leu
  MOD_RES (126)..(126): Gln or Leu
  MOD_RES (150)..(150): Ala or Val
  MOD_RES (164)..(164): Cys or Gly
  MOD_RES (171)..(171): Ala or Gly
  MOD_RES (187)..(187): Arg, Ile, or Lys
  MOD_RES (196)..(196): Ala, Cys, Leu, or Val
  MOD_RES (217)..(217): Leu, Ala, or Val
  MOD_RES (249)..(249): Thr or Ala
  MOD_RES (251)..(251): Asp or Gly
  MOD_RES (257)..(257): Glu or Lys
  MOD_RES (270)..(270): Gln, Ala, His, Phe, or Pro
  MOD_RES (272)..(272): Cys or Val
  MOD_RES (292)..(292): Trp or Arg
  MOD_RES (301)..(301): Ser or Arg
  MOD_RES (302)..(302): Trp or Lys
  MOD_RES (325)..(325): Lys or Val
  MOD_RES (332)..(332): Ala, Cys, Ser, or Val
  MOD_RES (352)..(352): Cys, Leu, or Val
  MOD_RES (363)..(363): Val or Arg
  MOD_RES (365)..(365): Leu, Gln, His, Ile, Lys, or Ser
  See specification as filed for detailed description of substitutions and preferred embodiments
XXSXXXLQXESVFQSGAHAYRIPALLYLPGQQSLLAFAEQRASXXDEHAELIVXRRGDYDAXTHQVQWXAQEVVAQAXLDGHRSMNPCPLYDXQTGTLFLFFIAIPXXVTEXQQLQTRANVTRLXXVTSTDHGRTWSSPRDLTDAAIGPXYREWSTFAVGPGHXLQLHDRXRSLVVPAYAYRKLHPXQRPIPSAFXFLSHDHGRTWARGHFVAQDTXECQVAEVETGEQRVVTLNARSHLRARVQAQSXNXGLDFQXSQLVKKLVEPPPXGXQGSVISFPSPRSGPGSPAQXLLYTHPTHXXQRADLGAYLNPRPPAPEAWSEPXLLAKGSXAYSDLQSMGTGPDGSPLFGXLYEANDYEEIXFXMFTLKQAFPAEYLPQGGGGSGGGGSDKTHTCPPCPAPELLGGPSVFLFPPKPKDTLMISRTPEVTCVVVDVSHEDPEVKFNWYVDGVEVHNAKTKPREEQYNSTYRVVSVLTVLHQDWLNGKEYKCKVSNKALPAPIEKTISKAKGQPREPQVYTLPPSREEMTKNQVSLTCLVKGFYPSDIAVEWESNGQPENNYKTTPPVLDSDGSFFLYSKLTVDKSRWQQGNVFSCSVMHEALHNHYTQKSLSLSPGKGGGGSGGGGSGGGGSEVQLVESGGGLVQPGGSLRLSCAASGFNIKDTYIHWVRQAPGKGLEWVARIYPTNGYTRYADSVKGRFTISADTSKNTAYLQMNSLRAEDTAVYYCSRWGGDGFYAMDYWGQGTLVTVSSGGGGSGGGGSGGGGSDIQMTQSPSSLSASVGDRVTITCRASQDVNTAVAWYQQKPGKAPKLLIYSASFLYSGVPSRFSGSRSGTDFTLTISSLQPEDFATYYCQQHYTTPPTFGQGTKVEIK

SEQ ID NO: 86 - DNA, 642 bp, Artificial Sequence
  Description of Artificial Sequence: Synthetic polynucleotide
gacatccagatgacacagagccctagcagcctgtctgccagcgtgggagacagagtgaccatcacctgtagagccagccaggacgtgaacacagccgtggcttggtatcagcagaagcctggcaaggcccctaagctgctgatctacagcgccagctttctgtactccggcgtgcccagcagattcagcggctctagaagcggcaccgacttcaccctgaccataagcagtctgcagcccgaggacttcgccacctactactgtcagcagcactacaccacacctccaacctttggccagggcaccaaggtggaaatcaagcgtacggtggctgcaccatctgtcttcatcttcccgccatctgatgagcagttgaaatctggaactgcctctgttgtgtgcctgctgaataacttctatcccagagaggccaaagtacagtggaaggtggataacgccctccaatcgggtaactcccaggagagtgtcacagagcaggacagcaaggacagcacctacagcctcagcagcaccctgacgctgagcaaagcagactacgagaaacacaaagtctacgcctgcgaagtcacccatcagggcctgagctcgcccgtcacaaagagcttcaacaggggagagtgt

SEQ ID NO: 87 - DNA, 1350 bp, Artificial Sequence
  Description of Artificial Sequence: Synthetic polynucleotide
gaggtgcagctggttgaatctggcggaggactggttcagcctggcggatctctgagactgtcttgtgccgccagcggcttcaacatcaaggacacctacatccactgggtccgacaggcccctggcaaaggacttgaatgggtcgccagaatctaccccaccaacggctacaccagatacgccgactctgtgaagggcagattcaccatcagcgccgacaccagcaagaacaccgcctacctgcagatgaacagcctgagagccgaggacaccgccgtgtactactgttctagatggggaggcgacggcttctacgccatggattattggggccagggcaccctggtcaccgtttcttctgctagcaccaagggcccatccgtcttccccctggcaccctcctccaagagcacctctgggggcacagcggccctgggctgcctggtcaaggactacttccccgaaccggtgacggtgtcctggaactcaggcgctctgaccagcggcgtgcacaccttcccggctgtcctacagtcctcaggactctactccctcagcagcgtggtgaccgtgccctccagcagcttgggcacccagacctacatctgcaacgtgaatcacaagcccagcaacaccaaggtggacaagaaagttgagcccaaatcttgtgacaaaactcacacatgcccaccgtgcccagcacctgaactcctggggggaccgtcagtcttcctcttccccccaaaacccaaggacaccctcatgatctcccggacccctgaggtcacatgcgtggtggtggacgtgagccacgaagaccctgaggtcaagttcaactggtacgtggacggcgtggaggtgcataatgccaagacaaagccgcgggaggagcagtacaacagcacgtaccgtgtggtcagcgtcctcaccgtcctgcaccaggactggctgaatggcaaggagtacaagtgcaaggtctccaacaaagccctcccagcccccatcgagaaaaccatctccaaagccaaagggcagccccgagaaccacaggtctacaccctgcccccatcccgggaggagatgaccaagaaccaggtcagcctgtactgcctggtcaaaggcttctatcccagcgacatcgccgtggagtgggagagcaatgggcagccggagaacaactacaagaccacgcctcccgtgctggactccgacggctccttcttcctctatagcaagctcaccgtggacaagagcaggtggcagcaggggaacgtcttctcatgctccgtgatgcatgaggctctgcacaaccactacacgcagaagagcctctccctgtctccgggtaaa

SEQ ID NO: 88 - DNA, 1851 bp, Artificial Sequence
  Description of Artificial Sequence: Synthetic polynucleotide
gatgcatctctgccttacctgcagaaagaaagcgtgttccagtctggcgcccacgcctacagaattcccgctctgctgtatctgccaggccagcagtctctgctggctttcgctgaacagcgggccagcaagaaggatgagcacgccgaactgatcgtgctgcggagaggcgattacgacgccggcacacatcaggtgcagtggcaggctcaagaggtggtggctcaggctagactggacggccacagatctatgaacccctgtcctctgtacgatgaacagaccggcacactgtttctgttctttatcgctatccccggccaagtgaccgagcagcagcagctgcagacaagagccaacgtgaccagactgtgtcaagtgacctccaccgaccacggcagaacctggtctagccctagagatctgaccgacgccgccatcggacctgcctatagagagtggtccaccttcgccgttggacctggacactgtctccagctgcacgacagggctagatctctggtggtgcctgcctacgcctatagaaagctgcaccccaaacagcggcctattcctagcgccttctgctttctgagccacgatcacggcaggacatgggccagaggacatttcgtggcccaggacacactggaatgccaggtggccgaagtggaaaccggcgagcagagagtcgtgaccctgaacgccagatctcacctgagagccagagtgcaggcccagagcacaaacgacggcctggatttccaagagagccagctggtcaagaaactggtggaacctcctccacagggctgtcagggaagcgtgatcagctttccatctcctagaagcggccctggctctcctgctcagtggctgctgtatacacaccccacacacagctggcagagagccgatctgggcgcctacctgaatcctagacctcctgctcctgaggcttggagcgaacctgttctgctggccaagggcagcgctgcctacagcgatctgcagtctatgggcacaggccctgatggcagccctctgtttggctgtctgtacgaggccaacgactacgaagagatcgtgttcctgatgttcaccctgaagcaggcctttccagccgagtacctgcctcaaggcggaggtggaagtggcggaggcggatccgacaaaactcacacatgcccaccgtgcccagcacctgaactcctggggggaccgtcagtcttcctcttccccccaaaacccaaggacaccctcatgatctcccggacccctgaggtcacatgcgtggtggtggacgtgagccacgaagaccctgaggtcaagttcaactggtacgtggacggcgtggaggtgcataatgccaagacaaagccgcgggaggagcagtacaacagcacgtaccgtgtggtcagcgtcctcaccgtcctgcaccaggactggctgaatggcaaggagtacaagtgcaaggtctccaacaaagccctcccagcccccatcgagaaaaccatctccaaagccaaagggcagccccgagaaccacaggtctacaccctgcccccatcccgggaggagatgaccaagaaccaggtcagcctgacctgcctggtcaaaggcttctatcccagcgacatcgccgtggagtgggagagcaatgggcagccggagaacaactacaagaccacgcctcccgtgctggactccgacggctccttcttcctcactagcaagctcaccgtggacaagagcaggtggcagcaggggaacgtcttctcatgctccgtgatgcatgaggctctgcacaaccactacacgcagaagagcctctccctgtctccgggtaaa

SEQ ID NO: 89 - DNA, 1140 bp, Artificial Sequence
  Description of Artificial Sequence: Synthetic polynucleotide
gatgcatctctgccttacctgcagaaagaaagcgtgttccagtctggcgcccacgcctacagaattcccgctctgctgtatctgccaggccagcagtctctgctggctttcgctgaacagcgggccagcaagaaggatgagcacgccgaactgatcgtgctgcggagaggcgattacgacgccggcacacatcaggtgcagtggcaggctcaagaggtggtggctcaggctagactggacggccacagatctatgaacccctgtcctctgtacgatgaacagaccggcacactgtttctgttctttatcgctatccccggccaagtgaccgagcagcagcagctgcagacaagagccaacgtgaccagactgtgtcaagtgacctccaccgaccacggcagaacctggtctagccctagagatctgaccgacgccgccatcggacctgcctatagagagtggtccaccttcgccgttggacctggacactgtctccagctgcacgacagggctagatctctggtggtgcctgcctacgcctatagaaagctgcaccccaaacagcggcctattcctagcgccttctgctttctgagccacgatcacggcaggacatgggccagaggacatttcgtggcccaggacacactggaatgccaggtggccgaagtggaaaccggcgagcagagagtcgtgaccctgaacgccagatctcacctgagagccagagtgcaggcccagagcacaaacgacggcctggatttccaagagagccagctggtcaagaaactggtggaacctcctccacagggctgtcagggaagcgtgatcagctttccatctcctagaagcggccctggctctcctgctcagtggctgctgtatacacaccccacacacagctggcagagagccgatctgggcgcctacctgaatcctagacctcctgctcctgaggcttggagcgaacctgttctgctggccaagggcagcgctgcctacagcgatctgcagtctatgggcacaggccctgatggcagccctctgtttggctgtctgtacgaggccaacgactacgaagagatcgtgttcctgatgttcaccctgaagcaggcctttccagccgagtacctgcctcaa

SEQ ID NO: 90 - protein, 618 aa, Artificial Sequence
  Description of Artificial Sequence: Synthetic polypeptide
TVEKSVVFKAEGEHFTDQKGNTIVGSGSGGTTKYFRIPAMCTTSKGTIVVFADARHNTASDQSFIDTAAARSTDGGKTWNKKIAIYNDRVNSKLSRVMDPTCIVANIQGRETILVMVGKWNNNDKTWGAYRDKAPDTDWDLVLYKSTDDGVTFSKVETNIHDIVTKNGTISAMLGGVGSGLQLNDGKLVFPVQMVRTKNITTVLNTSFIYSTDGITWSLPSGYCEGFGSENNIIEFNASLVNNIRNSGLRRSFETKDFGKTWTEFPPMDKKVDNRNHGVQGSTITIPSGNKLVAAHSSAQNKNNDYTRSDISLYAHNLYSGEVKLIDDFYPKVGNASGAGYSCLSYRKNVDKETLYVVYEANGSIEFQDLSRHLPVIKSYNGGGGSGGGGSDKTHTCPPCPAPELLGGPSVFLFPPKPKDTLMISRTPEVTCVVVDVSHEDPEVKFNWYVDGVEVHNAKTKPREEQYNSTYRVVSVLTVLHQDWLNGKEYKCKVSNKALPAPIEKTISKAKGQPREPQVYTLPPSREEMTKNQVSLTCLVKGFYPSDIAVEWESNGQPENNYKTTPPVLDSDGSFFLTSKLTVDKSRWQQGNVFSCSVMHEALHNHYTQKSLSLSPGK

SEQ ID NO: 91 - DNA, 1854 bp, Artificial Sequence
  Description of Artificial Sequence: Synthetic polynucleotide
acagtggaaaagtccgtggtgttcaaggccgagggcgagcacttcaccgaccagaaaggcaataccatcgtcggctctggcagcggcggcaccaccaagtactttagaatccccgccatgtgcaccaccagcaagggcaccattgtggtgttcgccgacgccagacacaacaccgccagcgatcagagcttcatcgataccgctgccgccagatctaccgatggcggcaagacctggaacaagaagatcgccatctacaacgaccgcgtgaacagcaagctgagcagagtgatggaccctacctgcatcgtggccaacatccagggcagagaaaccatcctggtcatggtcggaaagtggaacaacaacgataagacctggggcgcctacagagacaaggcccctgataccgattgggacctcgtgctgtacaagagcaccgatgacggcgtgaccttcagcaaggtggaaacaaacatccacgacatcgtgaccaagaacggcaccatctctgccatgctcggcggcgttggatctggcctgcaactgaatgatggcaagctggtgttccccgtgcagatggtccgaacaaagaatatcaccaccgtgctgaataccagcttcatctacagcaccgacggcatcacatggtccctgcctagcggctactgtgaaggctttggcagcgagaacaacatcatcgagttcaacgccagcctggtcaacaacatccggaacagcggcctgcggagaagcttcgagacaaaggacttcggaaagacgtggaccgagtttcctccaatggacaagaaggtggacaaccggaaccacggcgtgcagggcagcacaatcacaatccctagcggcaacaaactggtggccgctcactctagcgcccagaacaagaacaacgactacaccagaagcgacatcagcctgtacgcccacaacctgtacagcggcgaagtgaagctgatcgacgacttctaccccaaagtgggcaatgccagcggagccggctacagctgtctgagctaccggaaaaatgtggacaaagaaaccctgtacgtggtgtacgaggccaacggcagcatcgagtttcaggacctgagcagacatctgcccgtgatcaagagctacaacggcggaggtggaagtggcggaggcggatccgacaaaactcacacatgcccaccgtgcccagcacctgaactcctggggggaccgtcagtcttcctcttccccccaaaacccaaggacaccctcatgatctcccggacccctgaggtcacatgcgtggtggtggacgtgagccacgaagaccctgaggtcaagttcaactggtacgtggacggcgtggaggtgcataatgccaagacaaagccgcgggaggagcagtacaacagcacgtaccgtgtggtcagcgtcctcaccgtcctgcaccaggactggctgaatggcaaggagtacaagtgcaaggtctccaacaaagccctcccagcccccatcgagaaaaccatctccaaagccaaagggcagccccgagaaccacaggtctacaccctgcccccatcccgggaggagatgaccaagaaccaggtcagcctgacctgcctggtcaaaggcttctatcccagcgacatcgccgtggagtgggagagcaatgggcagccggagaacaactacaagaccacgcctcccgtgctggactccgacggctccttcttcctcactagcaagctcaccgtggacaagagcaggtggcagcaggggaacgtcttctcatgctccgtgatgcatgaggctctgcacaaccactacacgcagaagagcctctccctgtctccgggtaaa

SEQ ID NO: 92 - protein, 846 aa, Artificial Sequence
  Description of Artificial Sequence: Synthetic polypeptide
EVQLVESGGGLVQPGGSLRLSCAASGFNIKDTYIHWVRQAPGKGLEWVARIYPTNGYTRYADSVKGRFTISADTSKNTAYLQMNSLRAEDTAVYYCSRWGGDGFYAMDYWGQGTLVTVSSASTKGPSVFPLAPSSKSTSGGTAALGCLVKDYFPEPVTVSWNSGALTSGVHTFPAVLQSSGLYSLSSVVTVPSSSLGTQTYICNVNHKPSNTKVDKKVEPKSCDKTHTCPPCPAPELLGGPSVFLFPPKPKDTLMISRTPEVTCVVVDVSHEDPEVKFNWYVDGVEVHNAKTKPREEQYNSTYRVVSVLTVLHQDWLNGKEYKCKVSNKALPAPIEKTISKAKGQPREPQVYTLPPSREEMTKNQVSLTCLVKGFYPSDIAVEWESNGQPENNYKTTPPVLDSDGSFFLYSKLTVDKSRWQQGNVFSCSVMHEALHNHYTQKSLSLSPGKGGGGSGGGGSGGGGSTVEKSVVFKAEGEHFTDQKGNTIVGSGSGGTTKYFRIPAMCTTSKGTIVVFADARHNTASDQSFIDTAAARSTDGGKTWNKKIAIYNDRVNSKLSRVMDPTCIVANIQGRETILVMVGKWNNNDKTWGAYRDKAPDTDWDLVLYKSTDDGVTFSKVETNIHDIVTKNGTISAMLGGVGSGLQLNDGKLVFPVQMVRTKNITTVLNTSFIYSTDGITWSLPSGYCEGFGSENNIIEFNASLVNNIRNSGLRRSFETKDFGKTWTEFPPMDKKVDNRNHGVQGSTITIPSGNKLVAAHSSAQNKNNDYTRSDISLYAHNLYSGEVKLIDDFYPKVGNASGAGYSCLSYRKNVDKETLYVVYEANGSIEFQDLSRHLPVIKSYN

SEQ ID NO: 93 - DNA, 2538 bp, Artificial Sequence
  Description of Artificial Sequence: Synthetic polynucleotide
gaggtgcagctggttgaatctggcggaggactggttcagcctggcggatctctgagactgtcttgtgccgccagcggcttcaacatcaaggacacctacatccactgggtccgacaggcccctggcaaaggacttgaatgggtcgccagaatctaccccaccaacggctacaccagatacgccgactctgtgaagggcagattcaccatcagcgccgacaccagcaagaacaccgcctacctgcagatgaacagcctgagagccgaggacaccgccgtgtactactgttctagatggggaggcgacggcttctacgccatggattattggggccagggcaccctggtcaccgtttcttctgctagcaccaagggcccatccgtcttccccctggcaccctcctccaagagcacctctgggggcacagcggccctgggctgcctggtcaaggactacttccccgaaccggtgacggtgtcctggaactcaggcgctctgaccagcggcgtgcacaccttcccggctgtcctacagtcctcaggactctactccctcagcagcgtggtgaccgtgccctccagcagcttgggcacccagacctacatctgcaacgtgaatcacaagcccagcaacaccaaggtggacaagaaagttgagcccaaatcttgtgacaaaactcacacatgcccaccgtgcccagcacctgaactcctggggggaccgtcagtcttcctcttccccccaaaacccaaggacaccctcatgatctcccggacccctgaggtcacatgcgtggtggtggacgtgagccacgaagaccctgaggtcaagttcaactggtacgtggacggcgtggaggtgcataatgccaagacaaagccgcgggaggagcagtacaacagcacgtaccgtgtggtcagcgtcctcaccgtcctgcaccaggactggctgaatggcaaggagtacaagtgcaaggtctccaacaaagccctcccagcccccatcgagaaaaccatctccaaagccaaagggcagccccgagaaccacaggtctacaccctgcccccatcccgggaggagatgaccaagaaccaggtcagcctgacctgcctggtcaaaggcttctatcccagcgacatcgccgtggagtgggagagcaatgggcagccggagaacaactacaagaccacgcctcccgtgctggactccgacggctccttcttcctctatagcaagctcaccgtggacaagagcaggtggcagcaggggaacgtcttctcatgctccgtgatgcatgaggctctgcacaaccactacacgcagaagagcctctccctgtctccgggtaaaggtggcggaggatctggcggaggtggaagcggcggaggcggatctacagtggaaaagtccgtggtgttcaaggccgagggcgagcacttcaccgaccagaaaggcaataccatcgtcggctctggcagcggcggcaccaccaagtactttagaatccccgccatgtgcaccaccagcaagggcaccattgtggtgttcgccgacgccagacacaacaccgccagcgatcagagcttcatcgataccgctgccgccagaagtacagacggcggcaagacctggaacaagaagatcgccatctacaacgaccgcgtgaacagcaagctgagcagagtgatggaccctacctgcatcgtggccaacatccagggcagagaaaccatcctggtcatggtcggaaagtggaacaacaacgataagacctggggcgcctacagagacaaggcccctgataccgattgggacctcgtgctgtataagagcaccgacgacggcgtgaccttcagcaaggtggaaacaaacatccacgacatcgtgaccaagaacggcaccatctctgccatgctcggcggcgttggatctggcctgcaactgaatgatggcaagctggtgttccccgtgcagatggtccgaacaaagaacatcaccaccgtgctgaataccagcttcatctactccaccgacggcatcacatggtccctgcctagcggctactgtgaaggctttggcagcgagaacaacatcatcgagttcaacgccagcctggtcaacaacatccggaacagcggcctgcggagaagcttcgagacaaaggacttcggaaagacgtggaccgagtttcctccaatggacaagaaggtggacaaccggaaccacggcgtgcagggcagcacaatcacaatccctagcggcaacaaactggtggccgctcactctagcgcccagaacaagaacaacgattacaccagaagcgacatcagcctgtacgcccacaacctgtactccggcgaagtgaagctgatcgacgacttctaccccaaagtgggcaatgccagcggagccggctacagctgtctgagctaccggaaaaatgtggacaaagaaaccctgtacgtggtgtacgaggccaacggcagcatcgagtttcaggacctgagcagacatctgcccgtgatcaagagctacaat

SEQ ID NO: 94 - protein, 875 aa, Artificial Sequence
  Description of Artificial Sequence: Synthetic polypeptide
TVEKSVVFKAEGEHFTDQKGNTIVGSGSGGTTKYFRIPAMCTTSKGTIVVFADARHNTASDQSFIDTAAARSTDGGKTWNKKIAIYNDRVNSKLSRVMDPTCIVANIQGRETILVMVGKWNNNDKTWGAYRDKAPDTDWDLVLYKSTDDGVTFSKVETNIHDIVTKNGTISAMLGGVGSGLQLNDGKLVFPVQMVRTKNITTVLNTSFIYSTDGITWSLPSGYCEGFGSENNIIEFNASLVNNIRNSGLRRSFETKDFGKTWTEFPPMDKKVDNRNHGVQGSTITIPSGNKLVAAHSSAQNKNNDYTRSDISLYAHNLYSGEVKLIDDFYPKVGNASGAGYSCLSYRKNVDKETLYVVYEANGSIEFQDLSRHLPVIKSYNGGGGSGGGGSDKTHTCPPCPAPELLGGPSVFLFPPKPKDTLMISRTPEVTCVVVDVSHEDPEVKFNWYVDGVEVHNAKTKPREEQYNSTYRVVSVLTVLHQDWLNGKEYKCKVSNKALPAPIEKTISKAKGQPREPQVYTLPPSREEMTKNQVSLTCLVKGFYPSDIAVEWESNGQPENNYKTTPPVLDSDGSFFLYSKLTVDKSRWQQGNVFSCSVMHEALHNHYTQKSLSLSPGKGGGGSGGGGSGGGGSEVQLVESGGGLVQPGGSLRLSCAASGFNIKDTYIHWVRQAPGKGLEWVARIYPTNGYTRYADSVKGRFTISADTSKNTAYLQMNSLRAEDTAVYYCSRWGGDGFYAMDYWGQGTLVTVSSGGGGSGGGGSGGGGSDIQMTQSPSSLSASVGDRVTITCRASQDVNTAVAWYQQKPGKAPKLLIYSASFLYSGVPSRFSGSRSGTDFTLTISSLQPEDFATYYCQQHYTTPPTFGQGTKVEIK

SEQ ID NO: 95 - DNA, 2625 bp, Artificial Sequence
  Description of Artificial Sequence: Synthetic polynucleotide
acagtggaaaagtccgtggtgttcaaggccgagggcgagcacttcaccgaccagaaaggcaataccatcgtcggctctggcagcggcggcaccaccaagtactttagaatccccgccatgtgcaccaccagcaagggcaccattgtggtgttcgccgacgccagacacaacaccgccagcgatcagagcttcatcgataccgctgccgccagatctaccgatggcggcaagacctggaacaagaagatcgccatctacaacgaccgcgtgaacagcaagctgagcagagtgatggaccctacctgcatcgtggccaacatccagggcagagaaaccatcctggtcatggtcggaaagtggaacaacaacgataagacctggggcgcctacagagacaaggcccctgataccgattgggacctcgtgctgtacaagagcaccgatgacggcgtgaccttcagcaaggtggaaacaaacatccacgacatcgtgaccaagaacggcaccatctctgccatgctcggcggcgttggatctggcctgcaactgaatgatggcaagctggtgttccccgtgcagatggtccgaacaaagaatatcaccaccgtgctgaataccagcttcatctacagcaccgacggcatcacatggtccctgcctagcggctactgtgaaggctttggcagcgagaacaacatcatcgagttcaacgccagcctggtcaacaacatccggaacagcggcctgcggagaagcttcgagacaaaggacttcggaaagacgtggaccgagtttcctccaatggacaagaaggtggacaaccggaaccacggcgtgcagggcagcacaatcacaatccctagcggcaacaaactggtggccgctcactctagcgcccagaacaagaacaacgactacaccagaagcgacatcagcctgtacgcccacaacctgtacagcggcgaagtgaagctgatcgacgacttctaccccaaagtgggcaatgccagcggagccggctacagctgtctgagctaccggaaaaatgtggacaaagaaaccctgtacgtggtgtacgaggccaacggcagcatcgagtttcaggacctgagcagacatctgcccgtgatcaagagctacaacggcggaggtggaagtggcggaggcggatccgacaaaactcacacatgcccaccgtgcccagcacctgaactcctggggggaccgtcagtcttcctcttccccccaaaacccaaggacaccctcatgatctcccggacccctgaggtcacatgcgtggtggtggacgtgagccacgaagaccctgaggtcaagttcaactggtacgtggacggcgtggaggtgcataatgccaagacaaagccgcgggaggagcagtacaacagcacgtaccgtgtggtcagcgtcctcaccgtcctgcaccaggactggctgaatggcaaggagtacaagtgcaaggtctccaacaaagccctcccagcccccatcgagaaaaccatctccaaagccaaagggcagccccgagaaccacaggtctacaccctgcccccatcccgggaggagatgaccaagaaccaggtcagcctgacctgcctggtcaaaggcttctatcccagcgacatcgccgtggagtgggagagcaatgggcagccggagaacaactacaagaccacgcctcccgtgctggactccgacggctccttcttcctctatagcaagctcaccgtggacaagagcaggtggcagcaggggaacgtcttctcatgctccgtgatgcatgaggctctgcacaaccactacacgcagaagagcctctccctgtctccgggtaaaggaggcggaggatctggcggaggtggaagtggcggaggcggatctgaggtgcagctggttgaatctggcggaggactggttcagcctggcggatctctgagactgtcttgtgccgccagcggcttcaacatcaaggacacctacatccactgggtccgacaggcccctggcaaaggacttgaatgggtcgccagaatctaccccaccaacggctacaccagatacgccgactctgtgaagggcagattcaccatcagcgccgacaccagcaagaacaccgcctacctgcagatgaacagcctgagagccgaggacaccgccgtgtactactgttctagatggggaggcgacggcttctacgccatggattattggggccagggcaccctggtcaccgtttcttctggcggaggaggatctggcggaggcggaagtggcggaggcggatctgacatccagatgacacagagccctagcagcctgtctgccagcgtgggagacagagtgaccatcacctgtagagccagccaggacgtgaacacagccgtggcttggtatcagcagaagcctggcaaggcccctaagctgctgatctacagcgccagctttctgtactccggcgtgcccagcagattcagcggctctagaagcggcaccgacttcaccctgaccataagcagtctgcagcccgaggacttcgccacctactactgtcagcagcactacaccacacctccaacctttggccagggcaccaaggtggaaatcaag

SEQ ID NO: 96 - protein, 618 aa, Artificial Sequence
  Description of Artificial Sequence: Synthetic polypeptide
TVEKSVVFKAEGEHFTDQKGNTIVGSGSGGTTKYFRIPAMCTTSKGTIVVFADARHNTASDQSFIDTAAARSTDGGKTWNKKIAIYNDRVNSKLSRVMVPTCIVANIQGRETILVMVGKWNNNDKTWGAYRDKAPDTDWDLVLYKSTDDGVTFSKVETNIHDIVTKNGTISAMLGGVGSGLQLNDGKLVFPVQMVRTKNITTVLNTSFIYSTDGITWSLPSGYCEGFGSVNNIIEFNASLVNNIRNSGLRRSFETKDFGKTWTEFPPMDKKVDNRNHGVQGSTITIPSGNKLVAAHSSAQNKNNDYTRSDISLYAHNLYSGEVKLIDDFYPKVGNASGAGYSCLSYRKNVDKETLYVVYEANGSIEFQDLSRHLPVIKSYNGGGGSGGGGSDKTHTCPPCPAPELLGGPSVFLFPPKPKDTLMISRTPEVTCVVVDVSHEDPEVKFNWYVDGVEVHNAKTKPREEQYNSTYRVVSVLTVLHQDWLNGKEYKCKVSNKALPAPIEKTISKAKGQPREPQVYTLPPSREEMTKNQVSLTCLVKGFYPSDIAVEWESNGQPENNYKTTPPVLDSDGSFFLTSKLTVDKSRWQQGNVFSCSVMHEALHNHYTQKSLSLSPGK

SEQ ID NO: 97 - DNA, 1854 bp, Artificial Sequence
  Description of Artificial Sequence: Synthetic polynucleotide
acagtggaaaagtccgtggtgttcaaggccgagggcgagcacttcaccgaccagaaaggcaataccatcgtcggctctggcagcggcggcaccaccaagtactttagaatccccgccatgtgcaccaccagcaagggcaccattgtggtgttcgccgacgccagacacaacaccgccagcgatcagagcttcatcgataccgctgccgccagaagtacagacggcggcaagacctggaacaagaagatcgccatctacaacgaccgcgtgaacagcaagctgagcagagtgatggtccctacctgcatcgtggccaacatccagggcagagaaaccatcctggtcatggtcggaaagtggaacaacaacgataagacctggggcgcctacagagacaaggcccctgataccgattgggacctcgtgctgtataagagcaccgacgacggcgtgaccttcagcaaggtggaaacaaacatccacgacatcgtgaccaagaacggcaccatctctgccatgctcggcggcgttggatctggcctgcaactgaatgatggcaagctggtgttccccgtgcagatggtccgaacaaagaacatcaccaccgtgctgaataccagcttcatctactccaccgacggcatcacatggtccctgcctagcggctactgtgaaggctttggcagcgtgaacaacatcatcgagttcaacgccagcctggtcaacaacatccggaacagcggcctgcggagaagcttcgagacaaaggacttcggaaagacgtggaccgagtttcctccaatggacaagaaggtggacaaccggaaccacggcgtgcagggcagcacaatcacaatccctagcggcaacaaactggtggccgctcactctagcgcccagaacaagaacaacgattacaccagaagcgacatcagcctgtacgcccacaacctgtactccggcgaagtgaagctgatcgacgacttctaccccaaagtgggcaatgccagcggagccggctacagctgtctgagctaccggaaaaatgtggacaaagaaaccctgtacgtggtgtacgaggccaacggcagcatcgagtttcaggacctgagcagacatctgcccgtgatcaagagctacaatggcggaggtggaagtggcggaggcggatccgacaaaactcacacatgcccaccgtgcccagcacctgaactcctggggggaccgtcagtcttcctcttccccccaaaacccaaggacaccctcatgatctcccggacccctgaggtcacatgcgtggtggtggacgtgagccacgaagaccctgaggtcaagttcaactggtacgtggacggcgtggaggtgcataatgccaagacaaagccgcgggaggagcagtacaacagcacgtaccgtgtggtcagcgtcctcaccgtcctgcaccaggactggctgaatggcaaggagtacaagtgcaaggtctccaacaaagccctcccagcccccatcgagaaaaccatctccaaagccaaagggcagccccgagaaccacaggtctacaccctgcccccatcccgggaggagatgaccaagaaccaggtcagcctgacctgcctggtcaaaggcttctatcccagcgacatcgccgtggagtgggagagcaatgggcagccggagaacaactacaagaccacgcctcccgtgctggactccgacggctccttcttcctcactagcaagctcaccgtggacaagagcaggtggcagcaggggaacgtcttctcatgctccgtgatgcatgaggctctgcacaaccactacacgcagaagagcctctccctgtctccgggtaaa

SEQ ID NO: 98 - protein, 611 aa, Artificial Sequence
  Description of Artificial Sequence: Synthetic polypeptide
ASLPYLQKESVFQSGAHAYRIPALLYLPGQQSLLAFAEQRASKKDEHAELIVLRRGDYDAPTHQVQWQAQEVVAQARLDGHRSMNPCPLYDAQTGTLFLFFIAIPGQVTEQQQLQTRANVTRLCQVTSTDHGRTWSSPRDLTDAAIGPAYREWSTFAVGPGHCLQLHDRARSLVVPAYAYRKLHPKQRPIPSAFCFLSHDHGRTWARGHFVAQDTLECQVAEVETGEQRVVTLNARSHLRARVQAQSTNDGLDFQESQLVKKLVEPPPQGCQGSVISFPSPRSGPGSPAQWLLYTHPTHSWQRADLGAYLNPRPPAPEAWSEPVLLAKGSCAYSDLQSMGTGPDGSPLFGCLYEANDYEEIVFLMFTLKQAFPAEYLPQEPKSSDKTHTCPPCPAPELLGGPSVFLFPPKPKDTLMISRTPEVTCVVVDVSHEDPEVKFNWYVDGVEVHNAKTKPREEQYNSTYRVVSVLTVLHQDWLNGKEYKCKVSNKALPAPIEKTISKAKGQPREPQVYTLPPSREEMTKNQVSLTCLVKGFYPSDIAVEWESNGQPENNYKTTPPVLDSDGSFFLTSKLTVDKSRWQQGNVFSCSVMHEALHNHYTQKSLSLSPGK

SEQ ID NO: 99 - protein, 611 aa, Artificial Sequence
  Description of Artificial Sequence: Synthetic polypeptide
ASLPYLQKESVFQSGAHAYRIPALLYLPGQQSLLAFAEQRASKKDEHAELIVLRRGDYDAPTHQVQWQAQEVVAQARLDGHRSMNPCPLYDAQTGTLFLFFIAIPGQVTEQQQLQTRANVTRLCQVTSTDHGRTWSSPRDLTDAAIGPAYREWSTFAVGPGHCLQLHDRARSLVVPAYAYRKLHPKQRPIPSAFCFLSHDHGRTWARGHFVAQDTLECQVAEVETGEQRVVTLNARSHLRARVQAQSTNDGLDFQESQLVKKLVEPPPQGCQGSVISFPSPRSGPGSPAQWLLYTHPTHSWQRADLGAYLNPRPPAPEAWSEPVLLAKGSAAYSDLQSMGTGPDGSPLFGCLYEANDYEEIVFLMFTLKQAFPAEYLPQEPKSSDKTHTCPPCPAPELLGGPSVFLFPPKPKDTLMISRTPEVTCVVVDVSHEDPEVKFNWYVDGVEVHNAKTKPREEQYNSTYRVVSVLTVLHQDWLNGKEYKCKVSNKALPAPIEKTISKAKGQPREPQVYTLPPSREEMTKNQVSLTCLVKGFYPSDIAVEWESNGQPENNYKTTPPVLDSDGSFFLTSKLTVDKSRWQQGNVFSCSVMHEALHNHYTQKSLSLSPGK

SEQ ID NO: 100 - protein, 612 aa, Artificial Sequence
  Description of Artificial Sequence: Synthetic polypeptide
AASLPYLQKESVFQSGAHAYRIPALLYLPGQQSLLAFAEQRASKKDEHAELIVLRRGDYDAPTHQVQWQAQEVVAQARLDGHRSMNPCPLYDAQTGTLFLFFIAIPGQVTEQQQLQTRANVTRLCQVTSTDHGRTWSSPRDLTDAAIGPAYREWSTFAVGPGHCLQLHDRARSLVVPAYAYRKLHPKQRPIPSAFCFLSHDHGRTWARGHFVAQDTLECQVAEVETGEQRVVTLNARSHLRARVQAQSTNDGLDFQESQLVKKLVEPPPQGCQGSVISFPSPRSGPGSPAQWLLYTHPTHSWQRADLGAYLNPRPPAPEAWSEPVLLAKGSAAYSDLQSMGTGPDGSPLFGCLYEANDYEEIVFLMFTLKQAFPAEYLPQEPKSSDKTHTCPPCPAPELLGGPSVFLFPPKPKDTLMISRTPEVTCVVVDVSHEDPEVKFNWYVDGVEVHNAKTKPREEQYNSTYRVVSVLTVLHQDWLNGKEYKCKVSNKALPAPIEKTISKAKGQPREPQVYTLPPSREEMTKNQVSLTCLVKGFYPSDIAVEWESNGQPENNYKTTPPVLDSDGSFFLTSKLTVDKSRWQQGNVFSCSVMHEALHNHYTQKSLSLSPGK

SEQ ID NO: 101 - protein, 612 aa, Artificial Sequence
  Description of Artificial Sequence: Synthetic polypeptide
DASLPYLQKESVFQSGAHAYRIPALLYLPGQQSLLAFAEQRASKKDEHAELIVLRRGDYDAPTHQVQWQAQEVVAQARLDGHRSMNPCPLYDAQTGTLFLFFIAIPGQVTEQQQLQTRANVTRLCQVTSTDHGRTWSSPRDLTDAAIGPAYREWSTFAVGPGHCLQLHDRARSLVVPAYAYRKLHPKQRPIPSAFCFLSHDHGRTWARGHFVAQDTLECQVAEVETGEQRVVTLNARSHLRARVQAQSTNDGLDFQESQLVKKLVEPPPQGCQGSVISFPSPRSGPGSPAQWLLYTHPTHSWQRADLGAYLNPRPPAPEAWSEPVLLAKGSAAYSDLQSMGTGPDGSPLFGCLYEANDYEEIVFLMFTLKQAFPAEYLPQEPKSSDKTHTCPPCPAPELLGGPSVFLFPPKPKDTLMISRTPEVTCVVVDVSHEDPEVKFNWYVDGVEVHNAKTKPREEQYNSTYRVVSVLTVLHQDWLNGKEYKCKVSNKALPAPIEKTISKAKGQPREPQVYTLPPSREEMTKNQVSLTCLVKGFYPSDIAVEWESNGQPENNYKTTPPVLDSDGSFFLTSKLTVDKSRWQQGNVFSCSVMHEALHNHYTQKSLSLSPGK

SEQ ID NO: 102 - protein, 612 aa, Artificial Sequence
  Description of Artificial Sequence: Synthetic polypeptide
AASLPYLQKESVFQSGAHAYRIPALLYLPGQQSLLAFAEQRASKKDEHAELIVLRRGDYDAPTHQVQWQAQEVVAQARLDGHRSMNPCPLYDAQTGTLFLFFIAIPGQVTEQQQLQTRANVTRLCQVTSTDHGRTWSSPRDLTDAAIGPAYREWSTFAVGPGHCLQLHDRARSLVVPAYAYRKLHPKQRPIPSAFCFLSHDHGRTWARGHFVAQDTLECQVAEVETGEQRVVTLNARSHLRARVQAQSTNDGLDFQESQLVKKLVEPPPQGCQGSVISFPSPRSGPGSPAQWLLYTHPTHSWQRADLGAYLNPRPPAPEAWSEPVLLAKGSCAYSDLQSMGTGPDGSPLFGCLYEANDYEEIVFLMFTLKQAFPAEYLPQEPKSSDKTHTCPPCPAPELLGGPSVFLFPPKPKDTLMISRTPEVTCVVVDVSHEDPEVKFNWYVDGVEVHNAKTKPREEQYNSTYRVVSVLTVLHQDWLNGKEYKCKVSNKALPAPIEKTISKAKGQPREPQVYTLPPSREEMTKNQVSLTCLVKGFYPSDIAVEWESNGQPENNYKTTPPVLDSDGSFFLTSKLTVDKSRWQQGNVFSCSVMHEALHNHYTQKSLSLSPGK

SEQ ID NO: 103 - protein, 612 aa, Artificial Sequence
  Description of Artificial Sequence: Synthetic polypeptide
DASLPYLQKESVFQSGAHAYRIPALLYLPGQQSLLAFAEQRASKKDEHAELIVLRRGDYDAPTHQVQWQAQEVVAQARLDGHRSMNPCPLYDAQTGTLFLFFIAIPGQVTEQQQLQTRANVTRLCQVTSTDHGRTWSSPRDLTDAAIGPAYREWSTFAVGPGHCLQLHDRARSLVVPAYAYRKLHPKQRPIPSAFCFLSHDHGRTWARGHFVAQDTLECQVAEVETGEQRVVTLNARSHLRARVQAQSTNDGLDFQESQLVKKLVEPPPQGCQGSVISFPSPRSGPGSPAQWLLYTHPTHSWQRADLGAYLNPRPPAPEAWSEPVLLAKGSCAYSDLQSMGTGPDGSPLFGCLYEANDYEEIVFLMFTLKQAFPAEYLPQEPKSSDKTHTCPPCPAPELLGGPSVFLFPPKPKDTLMISRTPEVTCVVVDVSHEDPEVKFNWYVDGVEVHNAKTKPREEQYNSTYRVVSVLTVLHQDWLNGKEYKCKVSNKALPAPIEKTISKAKGQPREPQVYTLPPSREEMTKNQVSLTCLVKGFYPSDIAVEWESNGQPENNYKTTPPVLDSDGSFFLTSKLTVDKSRWQQGNVFSCSVMHEALHNHYTQKSLSLSPGK

SEQ ID NO: 104 - protein, 612 aa, Artificial Sequence
  Description of Artificial Sequence: Synthetic polypeptide
MASLPYLQKESVFQSGAHAYRIPALLYLPGQQSLLAFAEQRASKKDEHAELIVLRRGDYDAPTHQVQWQAQEVVAQARLDGHRSMNPCPLYDAQTGTLFLFFIAIPGQVTEQQQLQTRANVTRLCQVTSTDHGRTWSSPRDLTDAAIGPAYREWSTFAVGPGHCLQLHDRARSLVVPAYAYRKLHPKQRPIPSAFCFLSHDHGRTWARGHFVAQDTLECQVAEVETGEQRVVTLNARSHLRARVQAQSTNDGLDFQESQLVKKLVEPPPQGCQGSVISFPSPRSGPGSPAQWLLYTHPTHSWQRADLGAYLNPRPPAPEAWSEPVLLAKGSCAYSDLQSMGTGPDGSPLFGCLYEANDYEEIVFLMFTLKQAFPAEYLPQEPKSSDKTHTCPPCPAPELLGGPSVFLFPPKPKDTLMISRTPEVTCVVVDVSHEDPEVKFNWYVDGVEVHNAKTKPREEQYNSTYRVVSVLTVLHQDWLNGKEYKCKVSNKALPAPIEKTISKAKGQPREPQVYTLPPSREEMTKNQVSLTCLVKGFYPSDIAVEWESNGQPENNYKTTPPVLDSDGSFFLTSKLTVDKSRWQQGNVFSCSVMHEALHNHYTQKSLSLSPGK

SEQ ID NO: 105 - protein, 612 aa, Artificial Sequence
  Description of Artificial Sequence: Synthetic polypeptide
MASLPYLQKESVFQSGAHAYRIPALLYLPGQQSLLAFAEQRASKKDEHAELIVLRRGDYDAPTHQVQWQAQEVVAQARLDGHRSMNPCPLYDAQTGTLFLFFIAIPGQVTEQQQLQTRANVTRLCQVTSTDHGRTWSSPRDLTDAAIGPAYREWSTFAVGPGHCLQLHDRARSLVVPAYAYRKLHPKQRPIPSAFCFLSHDHGRTWARGHFVAQDTLECQVAEVETGEQRVVTLNARSHLRARVQAQSTNDGLDFQESQLVKKLVEPPPQGCQGSVISFPSPRSGPGSPAQWLLYTHPTHSWQRADLGAYLNPRPPAPEAWSEPVLLAKGSAAYSDLQSMGTGPDGSPLFGCLYEANDYEEIVFLMFTLKQAFPAEYLPQEPKSSDKTHTCPPCPAPELLGGPSVFLFPPKPKDTLMISRTPEVTCVVVDVSHEDPEVKFNWYVDGVEVHNAKTKPREEQYNSTYRVVSVLTVLHQDWLNGKEYKCKVSNKALPAPIEKTISKAKGQPREPQVYTLPPSREEMTKNQVSLTCLVKGFYPSDIAVEWESNGQPENNYKTTPPVLDSDGSFFLTSKLTVDKSRWQQGNVFSCSVMHEALHNHYTQKSLSLSPGK

SEQ ID NO: 106 - protein, 612 aa, Artificial Sequence
  Description of Artificial Sequence: Synthetic polypeptide
DASLPYLQKESVFQSGAHAYRIPALLYLPGQQSLLAFAEQRASKKDEHAELIVLRRGDYDAGTHQVQWQAQEVVAQARLDGHRSMNPCPLYDEQTGTLFLFFIAIPGQVTEQQQLQTRANVTRLCQVTSTDHGRTWSSPRDLTDAAIGPAYREWSTFAVGPGHCLQLHDRARSLVVPAYAYRKLHPKQRPIPSAFCFLSHDHGRTWARGHFVAQDTLECQVAEVETGEQRVVTLNARSHLRARVQAQSTNDGLDFQESQLVKKLVEPPPQGCQGSVISFPSPRSGPGSPAQWLLYTHPTHSWQRADLGAYLNPRPPAPEAWSEPVLLAKGSAAYSDLQSMGTGPDGSPLFGCLYEANDYEEIVFLMFTLKQAFPAEYLPQEPKSSDKTHTCPPCPAPELLGGPSVFLFPPKPKDTLMISRTPEVTCVVVDVSHEDPEVKFNWYVDGVEVHNAKTKPREEQYNSTYRVVSVLTVLHQDWLNGKEYKCKVSNKALPAPIEKTISKAKGQPREPQVYTLPPSREEMTKNQVSLTCLVKGFYPSDIAVEWESNGQPENNYKTTPPVLDSDGSFFLTSKLTVDKSRWQQGNVFSCSVMHEALHNHYTQKSLSLSPGK

SEQ ID NO: 107 - protein, 612 aa, Artificial Sequence
  Description of Artificial Sequence: Synthetic polypeptide
DASLPYLQDESVFQSGAHAYRIPALLYLPGQQSLLAFAEQRASKKDEHAELIVLRRGDYDAPTHQVQWQAQEVVAQARLDGHRSMNPCPLYDEQTGTLFLFFIAIPGQVTEQQQLQTRANVTRLCQVTSTDHGRTWSSPRDLTDAAIGPAYREWSTFAVGPGHCLQLHDRARSLVVPAYAYRKLHPKQRPIPSAFCFLSHDHGRTWARGHFVAQDTLECQVAEVETGEQRVVTLNARSHLRARVQAQSTNDGLDFQESQLVKKLVEPPPQGCQGSVISFPSPRSGPGSPAQWLLYTHPTHSWQRADLGAYLNPRPPAPEAWSEPVLLAKGSAAYSDLQSMGTGPDGSPLFGCLYEANDYEEIRFIMFTLKQAFPAEYLPQEPKSSDKTHTCPPCPAPELLGGPSVFLFPPKPKDTLMISRTPEVTCVVVDVSHEDPEVKFNWYVDGVEVHNAKTKPREEQYNSTYRVVSVLTVLHQDWLNGKEYKCKVSNKALPAPIEKTISKAKGQPREPQVYTLPPSREEMTKNQVSLTCLVKGFYPSDIAVEWESNGQPENNYKTTPPVLDSDGSFFLTSKLTVDKSRWQQGNVFSCSVMHEALHNHYTQKSLSLSPGK

SEQ ID NO: 108 - protein, 612 aa, Artificial Sequence
  Description of Artificial Sequence: Synthetic polypeptide
DASLPYLQKESVFQSGAHAYRIPALLYLPGQQSLLAFAEQRASKKDEHAELIVLRRGDYDANTHQVQWQAQEVVAQARLDGHRSMNPCPLYDAQTGTLFLFFIAIPGQVTEQQQLQTRANVTRLCQVTSTDHGRTWSSPRDLTDAAIGPAYREWSTFAVGPGHCLQLHDRARSLVVPAYAYRKLHPKQRPIPSAFCFLSHDHGRTWARGHFVAQDTLECQVAEVETGEQRVVTLNARSHLRARVQAQSTNDGLDFQESQLVKKLVEPPPQGCQGSVISFPSPRSGPGSPAQWLLYTHPTHSWQRADLGAYLNPRPPAPEAWSEPVLLAKGSAAYSDLQSMGTGPDGSPLFGCLYEANDYEEIVFLMFTLKQAFPAEYLPQEPKSSDKTHTCPPCPAPELLGGPSVFLFPPKPKDTLMISRTPEVTCVVVDVSHEDPEVKFNWYVDGVEVHNAKTKPREEQYNSTYRVVSVLTVLHQDWLNGKEYKCKVSNKALPAPIEKTISKAKGQPREPQVYTLPPSREEMTKNQVSLTCLVKGFYPSDIAVEWESNGQPENNYKTTPPVLDSDGSFFLTSKLTVDKSRWQQGNVFSCSVMHEALHNHYTQKSLSLSPGK

SEQ ID NO: 109 - protein, 612 aa, Artificial Sequence
  Description of Artificial Sequence: Synthetic polypeptide
DASLPYLQKESVFQSGAHAYRIPALLYLPGQQSLLAFAEQRASKKDEHAELIVLRRGDYDAPTHQVQWQAQEVVAQARLDGHRSMNPCPLYDAQTGTLFLFFIAIPGQVTEQQQLQTRANVTRLCQVTSTDHGRTWSSPRDLTDAAIGPAYREWSTFAVGPGHCLQLHDRARSLVVPAYAYRKLHPKQRPIPSAFCFLSHDHGRTWARGHFVAQDTLECQVAEVETGEQRVVTLNARSHLRARVQAQSTNDGLDFQESQLVKKLVEPPPAGCQGSVISFPSPRSGPGSPAQWLLYTHPTHRKQRADLGAYLNPRPPAPEAWSEPVLLAKGSAAYSDLQSMGTGPDGSPLFGCLYEANDYEEIVFLMFTLKQAFPAEYLPQEPKSSDKTHTCPPCPAPELLGGPSVFLFPPKPKDTLMISRTPEVTCVVVDVSHEDPEVKFNWYVDGVEVHNAKTKPREEQYNSTYRVVSVLTVLHQDWLNGKEYKCKVSNKALPAPIEKTISKAKGQPREPQVYTLPPSREEMTKNQVSLTCLVKGFYPSDIAVEWESNGQPENNYKTTPPVLDSDGSFFLTSKLTVDKSRWQQGNVFSCSVMHEALHNHYTQKSLSLSPGK

SEQ ID NO: 110 - protein, 612 aa, Artificial Sequence
  Description of Artificial Sequence: Synthetic polypeptide
DASLPYLQKESVFQSGAHAYRIPALLYLPGQQSLLAFAEQRASKKDEHAELIVLRRGDYDASTHQVQWQAQEVVAQARLDGHRSMNPCPLYDAQTGTLFLFFIAIPGQVTEQQQLQTRANVTRLCQVTSTDHGRTWSSPRDLTDAAIGPAYREWSTFAVGPGHCLQLHDRARSLVVPAYAYRKLHPKQRPIPSAFCFLSHDHGRTWARGHFVAQDTLECQVAEVETGEQRVVTLNARSHLRARVQAQSTNDGLDFQESQLVKKLVEPPPAGCQGSVISFPSPRSGPGSPAQWLLYTHPTHRKQRADLGAYLNPRPPAPEAWSEPVLLAKGSAAYSDLQSMGTGPDGSPLFGCLYEANDYEEIVFLMFTLKQAFPAEYLPQEPKSSDKTHTCPPCPAPELLGGPSVFLFPPKPKDTLMISRTPEVTCVVVDVSHEDPEVKFNWYVDGVEVHNAKTKPREEQYNSTYRVVSVLTVLHQDWLNGKEYKCKVSNKALPAPIEKTISKAKGQPREPQVYTLPPSREEMTKNQVSLTCLVKGFYPSDIAVEWESNGQPENNYKTTPPVLDSDGSFFLTSKLTVDKSRWQQGNVFSCSVMHEALHNHYTQKSLSLSPGK

SEQ ID NO: 111 - protein, 612 aa, Artificial Sequence
  Description of Artificial Sequence: Synthetic polypeptide
DASLPYLQKESVFQSGAHAYRIPALLYLPGQQSLLAFAEQRASKKDEHAELIVLRRGDYDATTHQVQWQAQEVVAQARLDGHRSMNPCPLYDAQTGTLFLFFIAIPGQVTEQQQLQTRANVTRLCQVTSTDHGRTWSSPRDLTDAAIGPAYREWSTFAVGPGHCLQLHDRARSLVVPAYAYRKLHPKQRPIPSAFCFLSHDHGRTWARGHFVAQDTLECQVAEVETGEQRVVTLNARSHLRARVQAQSTNDGLDFQESQLVKKLVEPPPAGCQGSVISFPSPRSGPGSPAQWLLYTHPTHRKQRADLGAYLNPRPPAPEAWSEPVLLAKGSAAYSDLQSMGTGPDGSPLFGCLYEANDYEEIVFLMFTLKQAFPAEYLPQEPKSSDKTHTCPPCPAPELLGGPSVFLFPPKPKDTLMISRTPEVTCVVVDVSHEDPEVKFNWYVDGVEVHNAKTKPREEQYNSTYRVVSVLTVLHQDWLNGKEYKCKVSNKALPAPIEKTISKAKGQPREPQVYTLPPSREEMTKNQVSLTCLVKGFYPSDIAVEWESNGQPENNYKTTPPVLDSDGSFFLTSKLTVDKSRWQQGNVFSCSVMHEALHNHYTQKSLSLSPGK

SEQ ID NO: 112 - protein, 612 aa, Artificial Sequence
  Description of Artificial Sequence: Synthetic polypeptide
DASLPYLQKESVFQSGAHAYRIPALLYLPGQQSLLAFAEQRASKKDEHAELIVLRRGDYDANTHQVQWQAQEVVAQARLDGHRSMNPCPLYDAQTGTLFLFFIAIPGQVTEQQQLQTRANVTRLCQVTSTDHGRTWSSPRDLTDAAIGPAYREWSTFAVGPGHCLQLHDRARSLVVPAYAYRKLHPKQRPIPSAFCFLSHDHGRTWARGHFVAQDTLECQVAEVETGEQRVVTLNARSHLRARVQAQSTNDGLDFQESQLVKKLVEPPPAGCQGSVISFPSPRSGPGSPAQWLLYTHPTHRKQRADLGAYLNPRPPAPEAWSEPVLLAKGSAAYSDLQSMGTGPDGSPLFGCLYEANDYEEIVFLMFTLKQAFPAEYLPQEPKSSDKTHTCPPCPAPELLGGPSVFLFPPKPKDTLMISRTPEVTCVVVDVSHEDPEVKFNWYVDGVEVHNAKTKPREEQYNSTYRVVSVLTVLHQDWLNGKEYKCKVSNKALPAPIEKTISKAKGQPREPQVYTLPPSREEMTKNQVSLTCLVKGFYPSDIAVEWESNGQPENNYKTTPPVLDSDGSFFLTSKLTVDKSRWQQGNVFSCSVMHEALHNHYTQKSLSLSPGK

SEQ ID NO: 113 - protein, 616 aa, Artificial Sequence
  Description of Artificial Sequence: Synthetic polypeptide
ASLPYLQKESVFQSGAHAYRIPALLYLPGQQSLLAFAEQRASKKDEHAELIVLRRGDYDAPTHQVQWQAQEVVAQARLDGHRSMNPCPLYDAQTGTLFLFFIAIPGQVTEQQQLQTRANVTRLCQVTSTDHGRTWSSPRDLTDAAIGPAYREWSTFAVGPGHCLQLHDRARSLVVPAYAYRKLHPKQRPIPSAFCFLSHDHGRTWARGHFVAQDTLECQVAEVETGEQRVVTLNARSHLRARVQAQSTNDGLDFQESQLVKKLVEPPPQGCQGSVISFPSPRSGPGSPAQWLLYTHPTHSWQRADLGAYLNPRPPAPEAWSEPVLLAKGSCAYSDLQSMGTGPDGSPLFGCLYEANDYEEIVFLMFTLKQAFPAEYLPQGGGGSGGGGSDKTHTCPPCPAPELLGGPSVFLFPPKPKDTLMISRTPEVTCVVVDVSHEDPEVKFNWYVDGVEVHNAKTKPREEQYNSTYRVVSVLTVLHQDWLNGKEYKCKVSNKALPAPIEKTISKAKGQPREPQVYTLPPSREEMTKNQVSLTCLVKGFYPSDIAVEWESNGQPENNYKTTPPVLDSDGSFFLYSKLTVDKSRWQQGNVFSCSVMHEALHNHYTQKSLSLSPGK

SEQ ID NO: 114 - protein, 616 aa, Artificial Sequence
  Description of Artificial Sequence: Synthetic polypeptide
ASLPYLQKESVFQSGAHAYRIPALLYLPGQQSLLAFAEQRASKKDEHAELIVLRRGDYDAPTHQVQWQAQEVVAQARLDGHRSMNPCPLYDAQTGTLFLFFIAIPGQVTEQQQLQTRANVTRLCQVTSTDHGRTWSSPRDLTDAAIGPAYREWSTFAVGPGHCLQLHDRARSLVVPAYAYRKLHPKQRPIPSAFCFLSHDHGRTWARGHFVAQDTLECQVAEVETGEQRVVTLNARSHLRARVQAQSTNDGLDFQESQLVKKLVEPPPQGCQGSVISFPSPRSGPGSPAQWLLYTHPTHSWQRADLGAYLNPRPPAPEAWSEPVLLAKGSAAYSDLQSMGTGPDGSPLFGCLYEANDYEEIVFLMFTLKQAFPAEYLPQGGGGSGGGGSDKTHTCPPCPAPELLGGPSVFLFPPKPKDTLMISRTPEVTCVVVDVSHEDPEVKFNWYVDGVEVHNAKTKPREEQYNSTYRVVSVLTVLHQDWLNGKEYKCKVSNKALPAPIEKTISKAKGQPREPQVYTLPPSREEMTKNQVSLTCLVKGFYPSDIAVEWESNGQPENNYKTTPPVLDSDGSFFLYSKLTVDKSRWQQGNVFSCSVMHEALHNHYTQKSLSLSPGK

SEQ ID NO: 115 - protein, 617 aa, Artificial Sequence
  Description of Artificial Sequence: Synthetic polypeptide
AASLPYLQKESVFQSGAHAYRIPALLYLPGQQSLLAFAEQRASKKDEHAELIVLRRGDYDAPTHQVQWQAQEVVAQARLDGHRSMNPCPLYDAQTGTLFLFFIAIPGQVTEQQQLQTRANVTRLCQVTSTDHGRTWSSPRDLTDAAIGPAYREWSTFAVGPGHCLQLHDRARSLVVPAYAYRKLHPKQRPIPSAFCFLSHDHGRTWARGHFVAQDTLECQVAEVETGEQRVVTLNARSHLRARVQAQSTNDGLDFQESQLVKKLVEPPPQGCQGSVISFPSPRSGPGSPAQWLLYTHPTHSWQRADLGAYLNPRPPAPEAWSEPVLLAKGSAAYSDLQSMGTGPDGSPLFGCLYEANDYEEIVFLMFTLKQAFPAEYLPQGGGGSGGGGSDKTHTCPPCPAPELLGGPSVFLFPPKPKDTLMISRTPEVTCVVVDVSHEDPEVKFNWYVDGVEVHNAKTKPREEQYNSTYRVVSVLTVLHQDWLNGKEYKCKVSNKALPAPIEKTISKAKGQPREPQVYTLPPSREEMTKNQVSLTCLVKGFYPSDIAVEWESNGQPENNYKTTPPVLDSDGSFFLYSKLTVDKSRWQQGNVFSCSVMHEALHNHYTQKSLSLSPGK

SEQ ID NO: 116 - protein, 617 aa, Artificial Sequence
  Description of Artificial Sequence: Synthetic polypeptide
DASLPYLQKESVFQSGAHAYRIPALLYLPGQQSLLAFAEQRASKKDEHAELIVLRRGDYDAPTHQVQWQAQEVVAQARLDGHRSMNPCPLYDAQTGTLFLFFIAIPGQVTEQQQLQTRANVTRLCQVTSTDHGRTWSSPRDLTDAAIGPAYREWSTFAVGPGHCLQLHDRARSLVVPAYAYRKLHPKQRPIPSAFCFLSHDHGRTWARGHFVAQDTLECQVAEVETGEQRVVTLNARSHLRARVQAQSTNDGLDFQESQLVKKLVEPPPQGCQGSVISFPSPRSGPGSPAQWLLYTHPTHSWQRADLGAYLNPRPPAPEAWSEPVLLAKGSAAYSDLQSMGTGPDGSPLFGCLYEANDYEEIVFLMFTLKQAFPAEYLPQGGGGSGGGGSDKTHTCPPCPAPELLGGPSVFLFPPKPKDTLMISRTPEVTCVVVDVSHEDPEVKFNWYVDGVEVHNAKTKPREEQYNSTYRVVSVLTVLHQDWLNGKEYKCKVSNKALPAPIEKTISKAKGQPREPQVYTLPPSREEMTKNQVSLTCLVKGFYPSDIAVEWESNGQPENNYKTTPPVLDSDGSFFLYSKLTVDKSRWQQGNVFSCSVMHEALHNHYTQKSLSLSPGK

SEQ ID NO: 117 - protein, 617 aa, Artificial Sequence
  Description of Artificial Sequence: Synthetic polypeptide
AASLPYLQKESVFQSGAHAYRIPALLYLPGQQSLLAFAEQRASKKDEHAELIVLRRGDYDAPTHQVQWQAQEVVAQARLDGHRSMNPCPLYDAQTGTLFLFFIAIPGQVTEQQQLQTRANVTRLCQVTSTDHGRTWSSPRDLTDAAIGPAYREWSTFAVGPGHCLQLHDRARSLVVPAYAYRKLHPKQRPIPSAFCFLSHDHGRTWARGHFVAQDTLECQVAEVETGEQRVVTLNARSHLRARVQAQSTNDGLDFQESQLVKKLVEPPPQGCQGSVISFPSPRSGPGSPAQWLLYTHPTHSWQRADLGAYLNPRPPAPEAWSEPVLLAKGSCAYSDLQSMGTGPDGSPLFGCLYEANDYEEIVFLMFTLKQAFPAEYLPQGGGGSGGGGSDKTHTCPPCPAPELLGGPSVFLFPPKPKDTLMISRTPEVTCVVVDVSHEDPEVKFNWYVDGVEVHNAKTKPREEQYNSTYRVVSVLTVLHQDWLNGKEYKCKVSNKALPAPIEKTISKAKGQPREPQVYTLPPSREEMTKNQVSLTCLVKGFYPSDIAVEWESNGQPENNYKTTPPVLDSDGSFFLYSKLTVDKSRWQQGNVFSCSVMHEALHNHYTQKSLSLSPGK

SEQ ID NO: 118 - protein, 617 aa, Artificial Sequence
  Description of Artificial Sequence: Synthetic polypeptide
DASLPYLQKESVFQSGAHAYRIPALLYLPGQQSLLAFAEQRASKKDEHAELIVLRRGDYDAPTHQVQWQAQEVVAQARLDGHRSMNPCPLYDAQTGTLFLFFIAIPGQVTEQQQLQTRANVTRLCQVTSTDHGRTWSSPRDLTDAAIGPAYREWSTFAVGPGHCLQLHDRARSLVVPAYAYRKLHPKQRPIPSAFCFLSHDHGRTWARGHFVAQDTLECQVAEVETGEQRVVTLNARSHLRARVQAQSTNDGLDFQESQLVKKLVEPPPQGCQGSVISFPSPRSGPGSPAQWLLYTHPTHSWQRADLGAYLNPRPPAPEAWSEPVLLAKGSCAYSDLQSMGTGPDGSPLFGCLYEANDYEEIVFLMFTLKQAFPAEYLPQGGGGSGGGGSDKTHTCPPCPAPELLGGPSVFLFPPKPKDTLMISRTPEVTCVVVDVSHEDPEVKFNWYVDGVEVHNAKTKPREEQYNSTYRVVSVLTVLHQDWLNGKEYKCKVSNKALPAPIEKTISKAKGQPREPQVYTLPPSREEMTKNQVSLTCLVKGFYPSDIAVEWESNGQPENNYKTTPPVLDSDGSFFLYSKLTVDKSRWQQGNVFSCSVMHEALHNHYTQKSLSLSPGK

SEQ ID NO: 119 - protein, 617 aa, Artificial Sequence
  Description of Artificial Sequence: Synthetic polypeptide
MASLPYLQKESVFQSGAHAYRIPALLYLPGQQSLLAFAEQRASKKDEHAELIVLRRGDYDAPTHQVQWQAQEVVAQARLDGHRSMNPCPLYDAQTGTLFLFFIAIPGQVTEQQQLQTRANVTRLCQVTSTDHGRTWSSPRDLTDAAIGPAYREWSTFAVGPGHCLQLHDRARSLVVPAYAYRKLHPKQRPIPSAFCFLSHDHGRTWARGHFVAQDTLECQVAEVETGEQRVVTLNARSHLRARVQAQSTNDGLDFQESQLVKKLVEPPPQGCQGSVISFPSPRSGPGSPAQWLLYTHPTHSWQRADLGAYLNPRPPAPEAWSEPVLLAKGSCAYSDLQSMGTGPDGSPLFGCLYEANDYEEIVFLMFTLKQAFPAEYLPQGGGGSGGGGSDKTHTCPPCPAPELLGGPSVFLFPPKPKDTLMISRTPEVTCVVVDVSHEDPEVKFNWYVDGVEVHNAKTKPREEQYNSTYRVVSVLTVLHQDWLNGKEYKCKVSNKALPAPIEKTISKAKGQPREPQVYTLPPSREEMTKNQVSLTCLVKGFYPSDIAVEWESNGQPENNYKTTPPVLDSDGSFFLYSKLTVDKSRWQQGNVFSCSVMHEALHNHYTQKSLSLSPGK

SEQ ID NO: 120 - protein, 617 aa, Artificial Sequence
  Description of Artificial Sequence: Synthetic polypeptide
MASLPYLQKESVFQSGAHAYRIPALLYLPGQQSLLAFAEQRASKKDEHAELIVLRRGDYDAPTHQVQWQAQEVVAQARLDGHRSMNPCPLYDAQTGTLFLFFIAIPGQVTEQQQLQTRANVTRLCQVTSTDHGRTWSSPRDLTDAAIGPAYREWSTFAVGPGHCLQLHDRARSLVVPAYAYRKLHPKQRPIPSAFCFLSHDHGRTWARGHFVAQDTLECQVAEVETGEQRVVTLNARSHLRARVQAQSTNDGLDFQESQLVKKLVEPPPQGCQGSVISFPSPRSGPGSPAQWLLYTHPTHSWQRADLGAYLNPRPPAPEAWSEPVLLAKGSAAYSDLQSMGTGPDGSPLFGCLYEANDYEEIVFLMFTLKQAFPAEYLPQGGGGSGGGGSDKTHTCPPCPAPELLGGPSVFLFPPKPKDTLMISRTPEVTCVVVDVSHEDPEVKFNWYVDGVEVHNAKTKPREEQYNSTYRVVSVLTVLHQDWLNGKEYKCKVSNKALPAPIEKTISKAKGQPREPQVYTLPPSREEMTKNQVSLTCLVKGFYPSDIAVEWESNGQPENNYKTTPPVLDSDGSFFLYSKLTVDKSRWQQGNVFSCSVMHEALHNHYTQKSLSLSPGK

SEQ ID NO: 121 - protein, 617 aa, Artificial Sequence
  Description of Artificial Sequence: Synthetic polypeptide
DASLPYLQKESVFQSGAHAYRIPALLYLPGQQSLLAFAEQRASKKDEHAELIVLRRGDYDAGTHQVQWQAQEVVAQARLDGHRSMNPCPLYDEQTGTLFLFFIAIPGQVTEQQQLQTRANVTRLCQVTSTDHGRTWSSPRDLTDAAIGPAYREWSTFAVGPGHCLQLHDRARSLVVPAYAYRKLHPKQRPIPSAFCFLSHDHGRTWARGHFVAQDTLECQVAEVETGEQRVVTLNARSHLRARVQAQSTNDGLDFQESQLVKKLVEPPPQGCQGSVISFPSPRSGPGSPAQWLLYTHPTHSWQRADLGAYLNPRPPAPEAWSEPVLLAKGSAAYSDLQSMGTGPDGSPLFGCLYEANDYEEIVFLMFTLKQAFPAEYLPQGGGGSGGGGSDKTHTCPPCPAPELLGGPSVFLFPPKPKDTLMISRTPEVTCVVVDVSHEDPEVKFNWYVDGVEVHNAKTKPREEQYNSTYRVVSVLTVLHQDWLNGKEYKCKVSNKALPAPIEKTISKAKGQPREPQVYTLPPSREEMTKNQVSLTCLVKGFYPSDIAVEWESNGQPENNYKTTPPVLDSDGSFFLYSKLTVDKSRWQQGNVFSCSVMHEALHNHYTQKSLSLSPGK

SEQ ID NO: 122 - protein, 617 aa, Artificial Sequence
  Description of Artificial Sequence: Synthetic polypeptide
DASLPYLQDESVFQSGAHAYRIPALLYLPGQQSLLAFAEQRASKKDEHAELIVLRRGDYDAPTHQVQWQAQEVVAQARLDGHRSMNPCPLYDEQTGTLFLFFIAIPGQVTEQQQLQTRANVTRLCQVTSTDHGRTWSSPRDLTDAAIGPAYREWSTFAVGPGHCLQLHDRARSLVVPAYAYRKLHPKQRPIPSAFCFLSHDHGRTWARGHFVAQDTLECQVAEVETGEQRVVTLNARSHLRARVQAQSTNDGLDFQESQLVKKLVEPPPQGCQGSVISFPSPRSGPGSPAQWLLYTHPTHSWQRADLGAYLNPRPPAPEAWSEPVLLAKGSAAYSDLQSMGTGPDGSPLFGCLYEANDYEEIRFIMFTLKQAFPAEYLPQGGGGSGGGGSDKTHTCPPCPAPELLGGPSVFLFPPKPKDTLMISRTPEVTCVVVDVSHEDPEVKFNWYVDGVEVHNAKTKPREEQYNSTYRVVSVLTVLHQDWLNGKEYKCKVSNKALPAPIEKTISKAKGQPREPQVYTLPPSREEMTKNQVSLTCLVKGFYPSDIAVEWESNGQPENNYKTTPPVLDSDGSFFLYSKLTVDKSRWQQGNVFSCSVMHEALHNHYTQKSLSLSPGK

SEQ ID NO: 123 - protein, 617 aa, Artificial Sequence
  Description of Artificial Sequence: Synthetic polypeptide
DASLPYLQKESVFQSGAHAYRIPALLYLPGQQSLLAFAEQRASKKDEHAELIVLRRGDYDANTHQVQWQAQEVVAQARLDGHRSMNPCPLYDAQTGTLFLFFIAIPGQVTEQQQLQTRANVTRLCQVTSTDHGRTWSSPRDLTDAAIGPAYREWSTFAVGPGHCLQLHDRARSLVVPAYAYRKLHPKQRPIPSAFCFLSHDHGRTWARGHFVAQDTLECQVAEVETGEQRVVTLNARSHLRARVQAQSTNDGLDFQESQLVKKLVEPPPQGCQGSVISFPSPRSGPGSPAQWLLYTHPTHSWQRADLGAYLNPRPPAPEAWSEPVLLAKGSAAYSDLQSMGTGPDGSPLFGCLYEANDYEEIVFLMFTLKQAFPAEYLPQGGGGSGGGGSDKTHTCPPCPAPELLGGPSVFLFPPKPKDTLMISRTPEVTCVVVDVSHEDPEVKFNWYVDGVEVHNAKTKPREEQYNSTYRVVSVLTVLHQDWLNGKEYKCKVSNKALPAPIEKTISKAKGQPREPQVYTLPPSREEMTKNQVSLTCLVKGFYPSDIAVEWESNGQPENNYKTTPPVLDSDGSFFLYSKLTVDKSRWQQGNVFSCSVMHEALHNHYTQKSLSLSPGK

SEQ ID NO: 124 - protein, 617 aa, Artificial Sequence
  Description of Artificial Sequence: Synthetic polypeptide
DASLPYLQKESVFQSGAHAYRIPALLYLPGQQSLLAFAEQRASKKDEHAELIVLRRGDYDAPTHQVQWQAQEVVAQARLDGHRSMNPCPLYDAQTGTLFLFFIAIPGQVTEQQQLQTRANVTRLCQVTSTDHGRTWSSPRDLTDAAIGPAYREWSTFAVGPGHCLQLHDRARSLVVPAYAYRKLHPKQRPIPSAFCFLSHDHGRTWARGHFVAQDTLECQVAEVETGEQRVVTLNARSHLRARVQAQSTNDGLDFQESQLVKKLVEPPPAGCQGSVISFPSPRSGPGSPAQWLLYTHPTHRKQRADLGAYLNPRPPAPEAWSEPVLLAKGSAAYSDLQSMGTGPDGSPLFGCLYEANDYEEIVFLMFTLKQAFPAEYLPQGGGGSGGGGSDKTHTCPPCPAPELLGGPSVFLFPPKPKDTLMISRTPEVTCVVVDVSHEDPEVKFNWYVDGVEVHNAKTKPREEQYNSTYRVVSVLTVLHQDWLNGKEYKCKVSNKALPAPIEKTISKAKGQPREPQVYTLPPSREEMTKNQVSLTCLVKGFYPSDIAVEWESNGQPENNYKTTPPVLDSDGSFFLYSKLTVDKSRWQQGNVFSCSVMHEALHNHYTQKSLSLSPGK

SEQ ID NO: 125 - protein, 617 aa, Artificial Sequence
  Description of Artificial Sequence: Synthetic polypeptide
DASLPYLQKESVFQSGAHAYRIPALLYLPGQQSLLAFAEQRASKKDEHAELIVLRRGDYDASTHQVQWQAQEVVAQARLDGHRSMNPCPLYDAQTGTLFLFFIAIPGQVTEQQQLQTRANVTRLCQVTSTDHGRTWSSPRDLTDAAIGPAYREWSTFAVGPGHCLQLHDRARSLVVPAYAYRKLHPKQRPIPSAFCFLSHDHGRTWARGHFVAQDTLECQVAEVETGEQRVVTLNARSHLRARVQAQSTNDGLDFQESQLVKKLVEPPPAGCQGSVISFPSPRSGPGSPAQWLLYTHPTHRKQRADLGAYLNPRPPAPEAWSEPVLLAKGSAAYSDLQSMGTGPDGSPLFGCLYEANDYEEIVFLMFTLKQAFPAEYLPQGGGGSGGGGSDKTHTCPPCPAPELLGGPSVFLFPPKPKDTLMISRTPEVTCVVVDVSHEDPEVKFNWYVDGVEVHNAKTKPREEQYNSTYRVVSVLTVLHQDWLNGKEYKCKVSNKALPAPIEKTISKAKGQPREPQVYTLPPSREEMTKNQVSLTCLVKGFYPSDIAVEWESNGQPENNYKTTPPVLDSDGSFFLYSKLTVDKSRWQQGNVFSCSVMHEALHNHYTQKSLSLSPGK

SEQ ID NO: 126 - protein, 617 aa, Artificial Sequence
  Description of Artificial Sequence: Synthetic polypeptide
DASLPYLQKESVFQSGAHAYRIPALLYLPGQQSLLAFAEQRASKKDEHAELIVLRRGDYDATTHQVQWQAQEVVAQARLDGHRSMNPCPLYDAQTGTLFLFFIAIPGQVTEQQQLQTRANVTRLCQVTSTDHGRTWSSPRDLTDAAIGPAYREWSTFAVGPGHCLQLHDRARSLVVPAYAYRKLHPKQRPIPSAFCFLSHDHGRTWARGHFVAQDTLECQVAEVETGEQRVVTLNARSHLRARVQAQSTNDGLDFQESQLVKKLVEPPPAGCQGSVISFPSPRSGPGSPAQWLLYTHPTHRKQRADLGAYLNPRPPAPEAWSEPVLLAKGSAAYSDLQSMGTGPDGSPLFGCLYEANDYEEIVFLMFTLKQAFPAEYLPQGGGGSGGGGSDKTHTCPPCPAPELLGGPSVFLFPPKPKDTLMISRTPEVTCVVVDVSHEDPEVKFNWYVDGVEVHNAKTKPREEQYNSTYRVVSVLTVLHQDWLNGKEYKCKVSNKALPAPIEKTISKAKGQPREPQVYTLPPSREEMTKNQVSLTCLVKGFYPSDIAVEWESNGQPENNYKTTPPVLDSDGSFFLYSKLTVDKSRWQQGNVFSCSVMHEALHNHYTQKSLSLSPGK

SEQ ID NO: 127 - protein, 617 aa, Artificial Sequence
  Description of Artificial Sequence: Synthetic polypeptide
DASLPYLQKESVFQSGAHAYRIPALLYLPGQQSLLAFAEQRASKKDEHAELIVLRRGDYDANTHQVQWQAQEVVAQARLDGHRSMNPCPLYDAQTGTLFLFFIAIPGQVTEQQQLQTRANVTRLCQVTSTDHGRTWSSPRDLTDAAIGPAYREWSTFAVGPGHCLQLHDRARSLVVPAYAYRKLHPKQRPIPSAFCFLSHDHGRTWARGHFVAQDTLECQVAEVETGEQRVVTLNARSHLRARVQAQSTNDGLDFQESQLVKKLVEPPPAGCQGSVISFPSPRSGPGSPAQWLLYTHPTHRKQRADLGAYLNPRPPAPEAWSEPVLLAKGSAAYSDLQSMGTGPDGSPLFGCLYEANDYEEIVFLMFTLKQAFPAEYLPQGGGGSGGGGSDKTHTCPPCPAPELLGGPSVFLFPPKPKDTLMISRTPEVTCVVVDVSHEDPEVKFNWYVDGVEVHNAKTKPREEQYNSTYRVVSVLTVLHQDWLNGKEYKCKVSNKALPAPIEKTISKAKGQPREPQVYTLPPSREEMTKNQVSLTCLVKGFYPSDIAVEWESNGQPENNYKTTPPVLDSDGSFFLYSKLTVDKSRWQQGNVFSCSVMHEALHNHYTQKSLSLSPGK

SEQ ID NO: 128 - protein, 611 aa, Artificial Sequence
  Description of Artificial Sequence: Synthetic polypeptide
ASLPYLQKESVFQSGAHAYRIPALLYLPGQQSLLAFAEQRASKKDEHAELIVLRRGDYDAPTHQVQWQAQEVVAQARLDGHRSMNPCPLYDAQTGTLFLFFIAIPGQVTEQQQLQTRANVTRLCQVTSTDHGRTWSSPRDLTDAAIGPAYREWSTFAVGPGHCLQLHDRARSLVVPAYAYRKLHPKQRPIPSAFCFLSHDHGRTWARGHFVAQDTLECQVAEVETGEQRVVTLNARSHLRARVQAQSTNDGLDFQESQLVKKLVEPPPQGCQGSVISFPSPRSGPGSPAQWLLYTHPTHSWQRADLGAYLNPRPPAPEAWSEPVLLAKGSCAYSDLQSMGTGPDGSPLFGCLYEANDYEEIVFLMFTLKQAFPAEYLPQEPKSSDKTHTCPPCPAPELLGGPSVFLFPPKPKDTLMISRTPEVTCVVVDVSHEDPEVKFNWYVDGVEVHNAKTKPREEQYNSTYRVVSVLTVLHQDWLNGKEYKCKVSNKALPAPIEKTISKAKGQPREPQVYTLPPSREEMTKNQVSLTCLVKGFYPSDIAVEWESNGQPENNYKTTPPVLDSDGSFFLYSKLTVDKSRWQQGNVFSCSVMHEALHNHYTQKSLSLSPGK

SEQ ID NO: 129 - protein, 611 aa, Artificial Sequence
  Description of Artificial Sequence: Synthetic polypeptide
ASLPYLQKESVFQSGAHAYRIPALLYLPGQQSLLAFAEQRASKKDEHAELIVLRRGDYDAPTHQVQWQAQEVVAQARLDGHRSMNPCPLYDAQTGTLFLFFIAIPGQVTEQQQLQTRANVTRLCQVTSTDHGRTWSSPRDLTDAAIGPAYREWSTFAVGPGHCLQLHDRARSLVVPAYAYRKLHPKQRPIPSAFCFLSHDHGRTWARGHFVAQDTLECQVAEVETGEQRVVTLNARSHLRARVQAQSTNDGLDFQESQLVKKLVEPPPQGCQGSVISFPSPRSGPGSPAQWLLYTHPTHSWQRADLGAYLNPRPPAPEAWSEPVLLAKGSAAYSDLQSMGTGPDGSPLFGCLYEANDYEEIVFLMFTLKQAFPAEYLPQEPKSSDKTHTCPPCPAPELLGGPSVFLFPPKPKDTLMISRTPEVTCVVVDVSHEDPEVKFNWYVDGVEVHNAKTKPREEQYNSTYRVVSVLTVLHQDWLNGKEYKCKVSNKALPAPIEKTISKAKGQPREPQVYTLPPSREEMTKNQVSLTCLVKGFYPSDIAVEWESNGQPENNYKTTPPVLDSDGSFFLYSKLTVDKSRWQQGNVFSCSVMHEALHNHYTQKSLSLSPGK

SEQ ID NO: 130 - protein, 612 aa, Artificial Sequence
  Description of Artificial Sequence: Synthetic polypeptide
AASLPYLQKESVFQSGAHAYRIPALLYLPGQQSLLAFAEQRASKKDEHAELIVLRRGDYDAPTHQVQWQAQEVVAQARLDGHRSMNPCPLYDAQTGTLFLFFIAIPGQVTEQQQLQTRANVTRLCQVTSTDHGRTWSSPRDLTDAAIGPAYREWSTFAVGPGHCLQLHDRARSLVVPAYAYRKLHPKQRPIPSAFCFLSHDHGRTWARGHFVAQDTLECQVAEVETGEQRVVTLNARSHLRARVQAQSTNDGLDFQESQLVKKLVEPPPQGCQGSVISFPSPRSGPGSPAQWLLYTHPTHSWQRADLGAYLNPRPPAPEAWSEPVLLAKGSAAYSDLQSMGTGPDGSPLFGCLYEANDYEEIVFLMFTLKQAFPAEYLPQEPKSSDKTHTCPPCPAPELLGGPSVFLFPPKPKDTLMISRTPEVTCVVVDVSHEDPEVKFNWYVDGVEVHNAKTKPREEQYNSTYRVVSVLTVLHQDWLNGKEYKCKVSNKALPAPIEKTISKAKGQPREPQVYTLPPSREEMTKNQVSLTCLVKGFYPSDIAVEWESNGQPENNYKTTPPVLDSDGSFFLYSKLTVDKSRWQQGNVFSCSVMHEALHNHYTQKSLSLSPGK

SEQ ID NO: 131 - protein, 612 aa, Artificial Sequence
  Description of Artificial Sequence: Synthetic polypeptide
DASLPYLQKESVFQSGAHAYRIPALLYLPGQQSLLAFAEQRASKKDEHAELIVLRRGDYDAPTHQVQWQAQEVVAQARLDGHRSMNPCPLYDAQTGTLFLFFIAIPGQVTEQQQLQTRANVTRLCQVTSTDHGRTWSSPRDLTDAAIGPAYREWSTFAVGPGHCLQLHDRARSLVVPAYAYRKLHPKQRPIPSAFCFLSHDHGRTWARGHFVAQDTLECQVAEVETGEQRVVTLNARSHLRARVQAQSTNDGLDFQESQLVKKLVEPPPQGCQGSVISFPSPRSGPGSPAQWLLYTHPTHSWQRADLGAYLNPRPPAPEAWSEPVLLAKGSAAYSDLQSMGTGPDGSPLFGCLYEANDYEEIVFLMFTLKQAFPAEYLPQEPKSSDKTHTCPPCPAPELLGGPSVFLFPPKPKDTLMISRTPEVTCVVVDVSHEDPEVKFNWYVDGVEVHNAKTKPREEQYNSTYRVVSVLTVLHQDWLNGKEYKCKVSNKALPAPIEKTISKAKGQPREPQVYTLPPSREEMTKNQVSLTCLVKGFYPSDIAVEWESNGQPENNYKTTPPVLDSDGSFFLYSKLTVDKSRWQQGNVFSCSVMHEALHNHYTQKSLSLSPGK

SEQ ID NO: 132 - protein, 612 aa, Artificial Sequence
  Description of Artificial Sequence: Synthetic polypeptide
AASLPYLQKESVFQSGAHAYRIPALLYLPGQQSLLAFAEQRASKKDEHAELIVLRRGDYDAPTHQVQWQAQEVVAQARLDGHRSMNPCPLYDAQTGTLFLFFIAIPGQVTEQQQLQTRANVTRLCQVTSTDHGRTWSSPRDLTDAAIGPAYREWSTFAVGPGHCLQLHDRARSLVVPAYAYRKLHPKQRPIPSAFCFLSHDHGRTWARGHFVAQDTLECQVAEVETGEQRVVTLNARSHLRARVQAQSTNDGLDFQESQLVKKLVEPPPQGCQGSVISFPSPRSGPGSPAQWLLYTHPTHSWQRADLGAYLNPRPPAPEAWSEPVLLAKGSCAYSDLQSMGTGPDGSPLFGCLYEANDYEEIVFLMFTLKQAFPAEYLPQEPKSSDKTHTCPPCPAPELLGGPSVFLFPPKPKDTLMISRTPEVTCVVVDVSHEDPEVKFNWYVDGVEVHNAKTKPREEQYNSTYRVVSVLTVLHQDWLNGKEYKCKVSNKALPAPIEKTISKAKGQPREPQVYTLPPSREEMTKNQVSLTCLVKGFYPSDIAVEWESNGQPENNYKTTPPVLDSDGSFFLYSKLTVDKSRWQQGNVFSCSVMHEALHNHYTQKSLSLSPGK

SEQ ID NO: 133 - protein, 612 aa, Artificial Sequence
  Description of Artificial Sequence: Synthetic polypeptide
DASLPYLQKESVFQSGAHAYRIPALLYLPGQQSLLAFAEQRASKKDEHAELIVLRRGDYDAPTHQVQWQAQEVVAQARLDGHRSMNPCPLYDAQTGTLFLFFIAIPGQVTEQQQLQTRANVTRLCQVTSTDHGRTWSSPRDLTDAAIGPAYREWSTFAVGPGHCLQLHDRARSLVVPAYAYRKLHPKQRPIPSAFCFLSHDHGRTWARGHFVAQDTLECQVAEVETGEQRVVTLNARSHLRARVQAQSTNDGLDFQESQLVKKLVEPPPQGCQGSVISFPSPRSGPGSPAQWLLYTHPTHSWQRADLGAYLNPRPPAPEAWSEPVLLAKGSCAYSDLQSMGTGPDGSPLFGCLYEANDYEEIVFLMFTLKQAFPAEYLPQEPKSSDKTHTCPPCPAPELLGGPSVFLFPPKPKDTLMISRTPEVTCVVVDVSHEDPEVKFNWYVDGVEVHNAKTKPREEQYNSTYRVVSVLTVLHQDWLNGKEYKCKVSNKALPAPIEKTISKAKGQPREPQVYTLPPSREEMTKNQVSLTCLVKGFYPSDIAVEWESNGQPENNYKTTPPVLDSDGSFFLYSKLTVDKSRWQQGNVFSCSVMHEALHNHYTQKSLSLSPGK

SEQ ID NO: 134 - protein, 612 aa, Artificial Sequence
  Description of Artificial Sequence: Synthetic polypeptide
MASLPYLQKESVFQSGAHAYRIPALLYLPGQQSLLAFAEQRASKKDEHAELIVLRRGDYDAPTHQVQWQAQEVVAQARLDGHRSMNPCPLYDAQTGTLFLFFIAIPGQVTEQQQLQTRANVTRLCQVTSTDHGRTWSSPRDLTDAAIGPAYREWSTFAVGPGHCLQLHDRARSLVVPAYAYRKLHPKQRPIPSAFCFLSHDHGRTWARGHFVAQDTLECQVAEVETGEQRVVTLNARSHLRARVQAQSTNDGLDFQESQLVKKLVEPPPQGCQGSVISFPSPRSGPGSPAQWLLYTHPTHSWQRADLGAYLNPRPPAPEAWSEPVLLAKGSCAYSDLQSMGTGPDGSPLFGCLYEANDYEEIVFLMFTLKQAFPAEYLPQEPKSSDKTHTCPPCPAPELLGGPSVFLFPPKPKDTLMISRTPEVTCVVVDVSHEDPEVKFNWYVDGVEVHNAKTKPREEQYNSTYRVVSVLTVLHQDWLNGKEYKCKVSNKALPAPIEKTISKAKGQPREPQVYTLPPSREEMTKNQVSLTCLVKGFYPSDIAVEWESNGQPENNYKTTPPVLDSDGSFFLYSKLTVDKSRWQQGNVFSCSVMHEALHNHYTQKSLSLSPGK

SEQ ID NO: 135 - protein, 612 aa, Artificial Sequence
  Description of Artificial Sequence: Synthetic polypeptide
MASLPYLQKESVFQSGAHAYRIPALLYLPGQQSLLAFAEQRASKKDEHAELIVLRRGDYDAPTHQVQWQAQEVVAQARLDGHRSMNPCPLYDAQTGTLFLFFIAIPGQVTEQQQLQTRANVTRLCQVTSTDHGRTWSSPRDLTDAAIGPAYREWSTFAVGPGHCLQLHDRARSLVVPAYAYRKLHPKQRPIPSAFCFLSHDHGRTWARGHFVAQDTLECQVAEVETGEQRVVTLNARSHLRARVQAQSTNDGLDFQESQLVKKLVEPPPQGCQGSVISFPSPRSGPGSPAQWLLYTHPTHSWQRADLGAYLNPRPPAPEAWSEPVLLAKGSAAYSDLQSMGTGPDGSPLFGCLYEANDYEEIVFLMFTLKQAFPAEYLPQEPKSSDKTHTCPPCPAPELLGGPSVFLFPPKPKDTLMISRTPEVTCVVVDVSHEDPEVKFNWYVDGVEVHNAKTKPREEQYNSTYRVVSVLTVLHQDWLNGKEYKCKVSNKALPAPIEKTISKAKGQPREPQVYTLPPSREEMTKNQVSLTCLVKGFYPSDIAVEWESNGQPENNYKTTPPVLDSDGSFFLYSKLTVDKSRWQQGNVFSCSVMHEALHNHYTQKSLSLSPGK

SEQ ID NO: 136 - protein, 612 aa, Artificial Sequence
  Description of Artificial Sequence: Synthetic polypeptide
DASLPYLQKESVFQSGAHAYRIPALLYLPGQQSLLAFAEQRASKKDEHAELIVLRRGDYDAGTHQVQWQAQEVVAQARLDGHRSMNPCPLYDEQTGTLFLFFIAIPGQVTEQQQLQTRANVTRLCQVTSTDHGRTWSSPRDLTDAAIGPAYREWSTFAVGPGHCLQLHDRARSLVVPAYAYRKLHPKQRPIPSAFCFLSHDHGRTWARGHFVAQDTLECQVAEVETGEQRVVTLNARSHLRARVQAQSTNDGLDFQESQLVKKLVEPPPQGCQGSVISFPSPRSGPGSPAQWLLYTHPTHSWQRADLGAYLNPRPPAPEAWSEPVLLAKGSAAYSDLQSMGTGPDGSPLFGCLYEANDYEEIVFLMFTLKQAFPAEYLPQEPKSSDKTHTCPPCPAPELLGGPSVFLFPPKPKDTLMISRTPEVTCVVVDVSHEDPEVKFNWYVDGVEVHNAKTKPREEQYNSTYRVVSVLTVLHQDWLNGKEYKCKVSNKALPAPIEKTISKAKGQPREPQVYTLPPSREEMTKNQVSLTCLVKGFYPSDIAVEWESNGQPENNYKTTPPVLDSDGSFFLYSKLTVDKSRWQQGNVFSCSVMHEALHNHYTQKSLSLSPGK

SEQ ID NO: 137 - protein, 612 aa, Artificial Sequence
  Description of Artificial Sequence: Synthetic polypeptide
DASLPYLQDESVFQSGAHAYRIPALLYLPGQQSLLAFAEQRASKKDEHAELIVLRRGDYDAPTHQVQWQAQEVVAQARLDGHRSMNPCPLYDEQTGTLFLFFIAIPGQVTEQQQLQTRANVTRLCQVTSTDHGRTWSSPRDLTDAAIGPAYREWSTFAVGPGHCLQLHDRARSLVVPAYAYRKLHPKQRPIPSAFCFLSHDHGRTWARGHFVAQDTLECQVAEVETGEQRVVTLNARSHLRARVQAQSTNDGLDFQESQLVKKLVEPPPQGCQGSVISFPSPRSGPGSPAQWLLYTHPTHSWQRADLGAYLNPRPPAPEAWSEPVLLAKGSAAYSDLQSMGTGPDGSPLFGCLYEANDYEEIRFIMFTLKQAFPAEYLPQEPKSSDKTHTCPPCPAPELLGGPSVFLFPPKPKDTLMISRTPEVTCVVVDVSHEDPEVKFNWYVDGVEVHNAKTKPREEQYNSTYRVVSVLTVLHQDWLNGKEYKCKVSNKALPAPIEKTISKAKGQPREPQVYTLPPSREEMTKNQVSLTCLVKGFYPSDIAVEWESNGQPENNYKTTPPVLDSDGSFFLYSKLTVDKSRWQQGNVFSCSVMHEALHNHYTQKSLSLSPGK

SEQ ID NO: 138 - protein, 612 aa, Artificial Sequence
  Description of Artificial Sequence: Synthetic polypeptide
DASLPYLQKESVFQSGAHAYRIPALLYLPGQQSLLAFAEQRASKKDEHAELIVLRRGDYDANTHQVQWQAQEVVAQARLDGHRSMNPCPLYDAQTGTLFLFFIAIPGQVTEQQQLQTRANVTRLCQVTSTDHGRTWSSPRDLTDAAIGPAYREWSTFAVGPGHCLQLHDRARSLVVPAYAYRKLHPKQRPIPSAFCFLSHDHGRTWARGHFVAQDTLECQVAEVETGEQRVVTLNARSHLRARVQAQSTNDGLDFQESQLVKKLVEPPPQGCQGSVISFPSPRSGPGSPAQWLLYTHPTHSWQRADLGAYLNPRPPAPEAWSEPVLLAKGSAAYSDLQSMGTGPDGSPLFGCLYEANDYEEIVFLMFTLKQAFPAEYLPQEPKSSDKTHTCPPCPAPELLGGPSVFLFPPKPKDTLMISRTPEVTCVVVDVSHEDPEVKFNWYVDGVEVHNAKTKPREEQYNSTYRVVSVLTVLHQDWLNGKEYKCKVSNKALPAPIEKTISKAKGQPREPQVYTLPPSREEMTKNQVSLTCLVKGFYPSDIAVEWESNGQPENNYKTTPPVLDSDGSFFLYSKLTVDKSRWQQGNVFSCSVMHEALHNHYTQKSLSLSPGK

SEQ ID NO: 139 - protein, 612 aa, Artificial Sequence
  Description of Artificial Sequence: Synthetic polypeptide
DASLPYLQKESVFQSGAHAYRIPALLYLPGQQSLLAFAEQRASKKDEHAELIVLRRGDYDAPTHQVQWQAQEVVAQARLDGHRSMNPCPLYDAQTGTLFLFFIAIPGQVTEQQQLQTRANVTRLCQVTSTDHGRTWSSPRDLTDAAIGPAYREWSTFAVGPGHCLQLHDRARSLVVPAYAYRKLHPKQRPIPSAFCFLSHDHGRTWARGHFVAQDTLECQVAEVETGEQRVVTLNARSHLRARVQAQSTNDGLDFQESQLVKKLVEPPPAGCQGSVISFPSPRSGPGSPAQWLLYTHPTHRKQRADLGAYLNPRPPAPEAWSEPVLLAKGSAAYSDLQSMGTGPDGSPLFGCLYEANDYEEIVFLMFTLKQAFPAEYLPQEPKSSDKTHTCPPCPAPELLGGPSVFLFPPKPKDTLMISRTPEVTCVVVDVSHEDPEVKFNWYVDGVEVHNAKTKPREEQYNSTYRVVSVLTVLHQDWLNGKEYKCKVSNKALPAPIEKTISKAKGQPREPQVYTLPPSREEMTKNQVSLTCLVKGFYPSDIAVEWESNGQPENNYKTTPPVLDSDGSFFLYSKLTVDKSRWQQGNVFSCSVMHEALHNHYTQKSLSLSPGK

SEQ ID NO: 140 - protein, 612 aa, Artificial Sequence
  Description of Artificial Sequence: Synthetic polypeptide
DASLPYLQKESVFQSGAHAYRIPALLYLPGQQSLLAFAEQRASKKDEHAELIVLRRGDYDASTHQVQWQAQEVVAQARLDGHRSMNPCPLYDAQTGTLFLFFIAIPGQVTEQQQLQTRANVTRLCQVTSTDHGRTWSSPRDLTDAAIGPAYREWSTFAVGPGHCLQLHDRARSLVVPAYAYRKLHPKQRPIPSAFCFLSHDHGRTWARGHFVAQDTLECQVAEVETGEQRVVTLNARSHLRARVQAQSTNDGLDFQESQLVKKLVEPPPAGCQGSVISFPSPRSGPGSPAQWLLYTHPTHRKQRADLGAYLNPRPPAPEAWSEPVLLAKGSAAYSDLQSMGTGPDGSPLFGCLYEANDYEEIVFLMFTLKQAFPAEYLPQEPKSSDKTHTCPPCPAPELLGGPSVFLFPPKPKDTLMISRTPEVTCVVVDVSHEDPEVKFNWYVDGVEVHNAKTKPREEQYNSTYRVVSVLTVLHQDWLNGKEYKCKVSNKALPAPIEKTISKAKGQPREPQVYTLPPSREEMTKNQVSLTCLVKGFYPSDIAVEWESNGQPENNYKTTPPVLDSDGSFFLYSKLTVDKSRWQQGNVFSCSVMHEALHNHYTQKSLSLSPGK

SEQ ID NO: 141 - protein, 612 aa, Artificial Sequence
  Description of Artificial Sequence: Synthetic polypeptide
DASLPYLQKESVFQSGAHAYRIPALLYLPGQQSLLAFAEQRASKKDEHAELIVLRRGDYDATTHQVQWQAQEVVAQARLDGHRSMNPCPLYDAQTGTLFLFFIAIPGQVTEQQQLQTRANVTRLCQVTSTDHGRTWSSPRDLTDAAIGPAYREWSTFAVGPGHCLQLHDRARSLVVPAYAYRKLHPKQRPIPSAFCFLSHDHGRTWARGHFVAQDTLECQVAEVETGEQRVVTLNARSHLRARVQAQSTNDGLDFQESQLVKKLVEPPPAGCQGSVISFPSPRSGPGSPAQWLLYTHPTHRKQRADLGAYLNPRPPAPEAWSEPVLLAKGSAAYSDLQSMGTGPDGSPLFGCLYEANDYEEIVFLMFTLKQAFPAEYLPQEPKSSDKTHTCPPCPAPELLGGPSVFLFPPKPKDTLMISRTPEVTCVVVDVSHEDPEVKFNWYVDGVEVHNAKTKPREEQYNSTYRVVSVLTVLHQDWLNGKEYKCKVSNKALPAPIEKTISKAKGQPREPQVYTLPPSREEMTKNQVSLTCLVKGFYPSDIAVEWESNGQPENNYKTTPPVLDSDGSFFLYSKLTVDKSRWQQGNVFSCSVMHEALHNHYTQKSLSLSPGK

SEQ ID NO: 142 - protein, 612 aa, Artificial Sequence
  Description of Artificial Sequence: Synthetic polypeptide
DASLPYLQKESVFQSGAHAYRIPALLYLPGQQSLLAFAEQRASKKDEHAELIVLRRGDYDANTHQVQWQAQEVVAQARLDGHRSMNPCPLYDAQTGTLFLFFIAIPGQVTEQQQLQTRANVTRLCQVTSTDHGRTWSSPRDLTDAAIGPAYREWSTFAVGPGHCLQLHDRARSLVVPAYAYRKLHPKQRPIPSAFCFLSHDHGRTWARGHFVAQDTLECQVAEVETGEQRVVTLNARSHLRARVQAQSTNDGLDFQESQLVKKLVEPPPAGCQGSVISFPSPRSGPGSPAQWLLYTHPTHRKQRADLGAYLNPRPPAPEAWSEPVLLAKGSAAYSDLQSMGTGPDGSPLFGCLYEANDYEEIVFLMFTLKQAFPAEYLPQEPKSSDKTHTCPPCPAPELLGGPSVFLFPPKPKDTLMISRTPEVTCVVVDVSHEDPEVKFNWYVDGVEVHNAKTKPREEQYNSTYRVVSVLTVLHQDWLNGKEYKCKVSNKALPAPIEKTISKAKGQPREPQVYTLPPSREEMTKNQVSLTCLVKGFYPSDIAVEWESNGQPENNYKTTPPVLDSDGSFFLYSKLTVDKSRWQQGNVFSCSVMHEALHNHYTQKSLSLSPGK

SEQ ID NO: 143 - protein, 617 aa, Artificial Sequence
  Description of Artificial Sequence: Synthetic polypeptide
  MOD_RES (1)..(1): Ala, Arg, Asn, Asp, Gln, Glu, Gly, His, Leu, Lys, Met, Phe, Thr, Val, or not present
  MOD_RES (6)..(6): Phe, Trp, Tyr or Val
  MOD_RES (9)..(9): Lys or Asp
  MOD_RES (62)..(62): Pro, Asn, Asp, His, Glu, Gly, Ser or Thr
  MOD_RES (93)..(93): Ala, Glu, or Lys
  MOD_RES (187)..(187): Arg, Ile, or Lys
  MOD_RES (270)..(270): Gln, Ala, His, Phe, or Pro
  MOD_RES (301)..(301): Ser or Arg
  MOD_RES (302)..(302): Trp or Lys
  MOD_RES (332)..(332): Ala, Cys, Ser, or Val
  MOD_RES (363)..(363): Val or Arg
  MOD_RES (365)..(365): Leu, Gln, His, Ile, Lys, or Ser
  MOD_RES (381)..(390): This region may encompass "GGGGSGGGGS" or "EPKSS"
  See specification as filed for detailed description of substitutions and preferred embodiments
XASLPXLQXESVFQSGAHAYRIPALLYLPGQQSLLAFAEQRASKKDEHAELIVLRRGDYDAXTHQVQWQAQEVVAQARLDGHRSMNPCPLYDXQTGTLFLFFIAIPGQVTEQQQLQTRANVTRLCQVTSTDHGRTWSSPRDLTDAAIGPAYREWSTFAVGPGHCLQLHDRARSLVVPAYAYRKLHPXQRPIPSAFCFLSHDHGRTWARGHFVAQDTLECQVAEVETGEQRVVTLNARSHLRARVQAQSTNDGLDFQESQLVKKLVEPPPXGCQGSVISFPSPRSGPGSPAQWLLYTHPTHXXQRADLGAYLNPRPPAPEAWSEPVLLAKGSXAYSDLQSMGTGPDGSPLFGCLYEANDYEEIXFXMFTLKQAFPAEYLPQXXXXXXXXXXDKTHTCPPCPAPELLGGPSVFLFPPKPKDTLMISRTPEVTCVVVDVSHEDPEVKFNWYVDGVEVHNAKTKPREEQYNSTYRVVSVLTVLHQDWLNGKEYKCKVSNKALPAPIEKTISKAKGQPREPQVYTLPPSREEMTKNQVSLTCLVKGFYPSDIAVEWESNGQPENNYKTTPPVLDSDGSFFLTSKLTVDKSRWQQGNVFSCSVMHEALHNHYTQKSLSLSPGK

SEQ ID NO: 144 - protein, 617 aa, Artificial Sequence
  Description of Artificial Sequence: Synthetic polypeptide
  MOD_RES (1)..(1): Ala, Arg, Asn, Asp, Gln, Glu, Gly, His, Leu, Lys, Met, Phe, Thr, Val, or not present
  MOD_RES (2)..(2): Ala or Lys
  MOD_RES (4)..(4): Asn or Leu
  MOD_RES (5)..(5): Pro or His
  MOD_RES (6)..(6): Phe, Trp, Tyr or Val
  MOD_RES (9)..(9): Lys or Asp
  MOD_RES (44)..(44): Lys, Arg, or Glu
  MOD_RES (45)..(45): Lys, Ala, Arg, or Glu
  MOD_RES (54)..(54): Leu or Met
  MOD_RES (62)..(62): Pro, Asn, Asp, His, Glu, Gly, Ser or Thr
  MOD_RES (69)..(69): Gln or His
  MOD_RES (78)..(78): Arg or Lys
  MOD_RES (93)..(93): Ala, Glu or Lys
  MOD_RES (107)..(107): Gly or Asp
  MOD_RES (108)..(108): Gln or His
  MOD_RES (112)..(112): Gln, Arg, or Lys
  MOD_RES (125)..(125): Ala, Cys, Ile, Ser, Val, or Leu
  MOD_RES (126)..(126): Gln or Leu
  MOD_RES (150)..(150): Ala or Val
  MOD_RES (164)..(164): Cys or Gly
  MOD_RES (171)..(171): Ala or Gly
  MOD_RES (187)..(187): Arg, Ile, or Lys
  MOD_RES (196)..(196): Ala, Cys, Leu, or Val
  MOD_RES (217)..(217): Leu, Ala, or Val
  MOD_RES (249)..(249): Thr or Ala
  MOD_RES (251)..(251): Asp or Gly
  MOD_RES (257)..(257): Glu or Lys
  MOD_RES (270)..(270): Gln, Ala, His, Phe, or Pro
  MOD_RES (272)..(272): Cys or Val
  MOD_RES (292)..(292): Trp or Arg
  MOD_RES (301)..(301): Ser or Arg
  MOD_RES (302)..(302): Trp or Lys
  MOD_RES (325)..(325): Lys or Val
  MOD_RES (332)..(332): Ala, Cys, Ser, or Val
  MOD_RES (352)..(352): Cys, Leu, or Val
  MOD_RES (363)..(363): Val or Arg
  MOD_RES (365)..(365): Leu, Gln, His, Ile, Lys, or Ser
  MOD_RES (381)..(390): This region may encompass "GGGGSGGGGS" or "EPKSS"
  See specification as filed for detailed description of substitutions and preferred embodiments
XXSXXXLQXESVFQSGAHAYRIPALLYLPGQQSLLAFAEQRASXXDEHAELIVXRRGDYDAXTHQVQWXAQEVVAQAXLDGHRSMNPCPLYDXQTGTLFLFFIAIPXXVTEXQQLQTRANVTRLXXVTSTDHGRTWSSPRDLTDAAIGPXYREWSTFAVGPGHXLQLHDRXRSLVVPAYAYRKLHPXQRPIPSAFXFLSHDHGRTWARGHFVAQDTXECQVAEVETGEQRVVTLNARSHLRARVQAQSXNXGLDFQXSQLVKKLVEPPPXGXQGSVISFPSPRSGPGSPAQXLLYTHPTHXXQRADLGAYLNPRPPAPEAWSEPXLLAKGSXAYSDLQSMGTGPDGSPLFGXLYEANDYEEIXFXMFTLKQAFPAEYLPQXXXXXXXXXXDKTHTCPPCPAPELLGGPSVFLFPPKPKDTLMISRTPEVTCVVVDVSHEDPEVKFNWYVDGVEVHNAKTKPREEQYNSTYRVVSVLTVLHQDWLNGKEYKCKVSNKALPAPIEKTISKAKGQPREPQVYTLPPSREEMTKNQVSLTCLVKGFYPSDIAVEWESNGQPENNYKTTPPVLDSDGSFFLTSKLTVDKSRWQQGNVFSCSVMHEALHNHYTQKSLSLSPGK

SEQ ID NO: 145 - protein, 10 aa, Artificial Sequence
  Description of Artificial Sequence: Synthetic peptide
GGGGSGGGGS

SEQ ID NO: 146 - protein, 5 aa, Artificial Sequence
  Description of Artificial Sequence: Synthetic peptide
EPKSS

SEQ ID NO: 147 - protein, 232 aa, Artificial Sequence
  Description of Artificial Sequence: Synthetic polypeptide
EPKSCDKTHTCPPCPAPELLGGPSVFLFPPKPKDTLMISRTPEVTCVVVDVSHEDPEVKFNWYVDGVEVHNAKTKPREEQYNSTYRVVSVLTVLHQDWLNGKEYKCKVSNKALPAPIEKTISKAKGQPREPQVYTLPPSREEMTKNQVSLTCLVKGFYPSDIAVEWESNGQPENNYKTTPPVLDSDGSFFLTSKLTVDKSRWQQGNVFSCSVMHEALHNHYTQKSLSLSPGK

SEQ ID NO: 148 - protein, 227 aa, Artificial Sequence
  Description of Artificial Sequence: Synthetic polypeptide
DKTHTCPPCPAPELLGGPSVFLFPPKPKDTLMISRTPEVTCVVVDVSHEDPEVKFNWYVDGVEVHNAKTKPREEQYNSTYRVVSVLTVLHQDWLNGKEYKCKVSNKALPAPIEKTISKAKGQPREPQVYTLPPSREEMTKNQVSLYCLVKGFYPSDIAVEWESNGQPENNYKTTPPVLDSDGSFFLYSKLTVDKSRWQQGNVFSCSVMHEALHNHYTQKSLSLSPGK

SEQ ID NO: 149 - protein, 380 aa, Artificial Sequence
  Description of Artificial Sequence: Synthetic polypeptide
DASLPYLQKESVFQSGAHAYRIPALLYLPGQQSLLAFAEQRASKKDEHAELIVLRRGDYDAGTHQVQWQAQEVVAQARLDGHRSMNPCPLYDEQTGTLFLFFIAIPGQVTEQQQLQTRANVTRLCQVTSTDHGRTWSSPRDLTDAAIGPAYREWSTFAVGPGHCLQLHDRARSLVVPAYAYRKLHPKQRPIPSAFCFLSHDHGRTWARGHFVAQDTLECQVAEVETGEQRVVTLNARSHLRARVQAQSTNDGLDFQESQLVKKLVEPPPQGCQGSVISFPSPRSGPGSPAQWLLYTHPTHARQRADLGAYLNPRPPAPEAWSEPVLLAKGSAAYSDLQSMGTGPDGSPLFGCLYEANDYEEIVFLMFTLKQAFPAEYLPQ

SEQ ID NO: 150 - protein, 617 aa, Artificial Sequence
  Description of Artificial Sequence: Synthetic polypeptide
DASLPYLQKESVFQSGAHAYRIPALLYLPGQQSLLAFAEQRASKKDEHAELIVLRRGDYDAGTHQVQWQAQEVVAQARLDGHRSMNPCPLYDEQTGTLFLFFIAIPGQVTEQQQLQTRANVTRLCQVTSTDHGRTWSSPRDLTDAAIGPAYREWSTFAVGPGHCLQLHDRARSLVVPAYAYRKLHPKQRPIPSAFCFLSHDHGRTWARGHFVAQDTLECQVAEVETGEQRVVTLNARSHLRARVQAQSTNDGLDFQESQLVKKLVEPPPQGCQGSVISFPSPRSGPGSPAQWLLYTHPTHARQRADLGAYLNPRPPAPEAWSEPVLLAKGSAAYSDLQSMGTGPDGSPLFGCLYEANDYEEIVFLMFTLKQAFPAEYLPQGGGGSGGGGSDKTHTCPPCPAPELLGGPSVFLFPPKPKDTLMISRTPEVTCVVVDVSHEDPEVKFNWYVDGVEVHNAKTKPREEQYNSTYRVVSVLTVLHQDWLNGKEYKCKVSNKALPAPIEKTISKAKGQPREPQVYTLPPSREEMTKNQVSLTCLVKGFYPSDIAVEWESNGQPENNYKTTPPVLDSDGSFFLTSKLTVDKSRWQQGNVFSCSVMHEALHNHYTQKSLSLSPGK

SEQ ID NO: 151 - protein, 612 aa, Artificial Sequence
  Description of Artificial Sequence: Synthetic polypeptide
DASLPYLQKESVFQSGAHAYRIPALLYLPGQQSLLAFAEQRASKKDEHAELIVLRRGDYDAGTHQVQWQAQEVVAQARLDGHRSMNPCPLYDEQTGTLFLFFIAIPGQVTEQQQLQTRANVTRLCQVTSTDHGRTWSSPRDLTDAAIGPAYREWSTFAVGPGHCLQLHDRARSLVVPAYAYRKLHPKQRPIPSAFCFLSHDHGRTWARGHFVAQDTLECQVAEVETGEQRVVTLNARSHLRARVQAQSTNDGLDFQESQLVKKLVEPPPQGCQGSVISFPSPRSGPGSPAQWLLYTHPTHARQRADLGAYLNPRPPAPEAWSEPVLLAKGSAAYSDLQSMGTGPDGSPLFGCLYEANDYEEIVFLMFTLKQAFPAEYLPQEPKSSDKTHTCPPCPAPELLGGPSVFLFPPKPKDTLMISRTPEVTCVVVDVSHEDPEVKFNWYVDGVEVHNAKTKPREEQYNSTYRVVSVLTVLHQDWLNGKEYKCKVSNKALPAPIEKTISKAKGQPREPQVYTLPPSREEMTKNQVSLTCLVKGFYPSDIAVEWESNGQPENNYKTTPPVLDSDGSFFLTSKLTVDKSRWQQGNVFSCSVMHEALHNHYTQKSLSLSPGK

SEQ ID NO: 152 - protein, 617 aa, Artificial Sequence
  Description of Artificial Sequence: Synthetic polypeptide
DASLPYLQKESVFQSGAHAYRIPALLYLPGQQSLLAFAEQRASKKDEHAELIVLRRGDYDAGTHQVQWQAQEVVAQARLDGHRSMNPCPLYDEQTGTLFLFFIAIPGQVTEQQQLQTRANVTRLCQVTSTDHGRTWSSPRDLTDAAIGPAYREWSTFAVGPGHCLQLHDRARSLVVPAYAYRKLHPKQRPIPSAFCFLSHDHGRTWARGHFVAQDTLECQVAEVETGEQRVVTLNARSHLRARVQAQSTNDGLDFQESQLVKKLVEPPPQGCQGSVISFPSPRSGPGSPAQWLLYTHPTHARQRADLGAYLNPRPPAPEAWSEPVLLAKGSAAYSDLQSMGTGPDGSPLFGCLYEANDYEEIVFLMFTLKQAFPAEYLPQGGGGSGGGGSDKTHTCPPCPAPELLGGPSVFLFPPKPKDTLMISRTPEVTCVVVDVSHEDPEVKFNWYVDGVEVHNAKTKPREEQYNSTYRVVSVLTVLHQDWLNGKEYKCKVSNKALPAPIEKTISKAKGQPREPQVYTLPPSREEMTKNQVSLTCLVKGFYPSDIAVEWESNGQPENNYKTTPPVLDSDGSFFLYSKLTVDKSRWQQGNVFSCSVMHEALHNHYTQKSLSLSPGK

SEQ ID NO: 153 - protein, 612 aa, Artificial Sequence
  Description of Artificial Sequence: Synthetic polypeptide
DASLPYLQKESVFQSGAHAYRIPALLYLPGQQSLLAFAEQRASKKDEHAELIVLRRGDYDAGTHQVQWQAQEVVAQARLDGHRSMNPCPLYDEQTGTLFLFFIAIPGQVTEQQQLQTRANVTRLCQVTSTDHGRTWSSPRDLTDAAIGPAYREWSTFAVGPGHCLQLHDRARSLVVPAYAYRKLHPKQRPIPSAFCFLSHDHGRTWARGHFVAQDTLECQVAEVETGEQRVVTLNARSHLRARVQAQSTNDGLDFQESQLVKKLVEPPPQGCQGSVISFPSPRSGPGSPAQWLLYTHPTHARQRADLGAYLNPRPPAPEAWSEPVLLAKGSAAYSDLQSMGTGPDGSPLFGCLYEANDYEEIVFLMFTLKQAFPAEYLPQEPKSSDKTHTCPPCPAPELLGGPSVFLFPPKPKDTLMISRTPEVTCVVVDVSHEDPEVKFNWYVDGVEVHNAKTKPREEQYNSTYRVVSVLTVLHQDWLNGKEYKCKVSNKALPAPIEKTISKAKGQPREPQVYTLPPSREEMTKNQVSLTCLVKGFYPSDIAVEWESNGQPENNYKTTPPVLDSDGSFFLYSKLTVDKSRWQQGNVFSCSVMHEALHNHYTQKSLSLSPGK

SEQ ID NO: 154 - protein, 380 aa, Artificial Sequence
  Description of Artificial Sequence: Synthetic polypeptide
DASLPYLQKESVFQSGAHAYRIPALLYLPGQQSLLAFAEQRASKKDEHAELIVLRRGDYDAGTHQVQWQAQEVVAQARLDGHRSMNPCPLYDEQTGTLFLFFIAIPGQVTEQQQLQTRANVTRLCYVTSTDHGRTWSSPRDLTDAAIGPAYREWSTFAVGPGHCLQLHDRARSLVVPAYAYRKLHPKQRPIPSAFCFLSHDHGRTWARGHFVAQDTLECQVAEVETGEQRVVTLNARSHLRARVQAQSTNDGLDFQESQLVKKLVEPPPTGCQGSVISFPSPRSGPGSPAQWLLYTHPTHSWQRADLGAYLNPRPPAPEAWSEPVLLAKGSAAYSDLQSMGTGPDGSPLFGCLYEANDYEEIVFLMFTLKQAFPAEYLPQ

SEQ ID NO: 155 - protein, 617 aa, Artificial Sequence
  Description of Artificial Sequence: Synthetic polypeptide
DASLPYLQKESVFQSGAHAYRIPALLYLPGQQSLLAFAEQRASKKDEHAELIVLRRGDYDAGTHQVQWQAQEVVAQARLDGHRSMNPCPLYDEQTGTLFLFFIAIPGQVTEQQQLQTRANVTRLCYVTSTDHGRTWSSPRDLTDAAIGPAYREWSTFAVGPGHCLQLHDRARSLVVPAYAYRKLHPKQRPIPSAFCFLSHDHGRTWARGHFVAQDTLECQVAEVETGEQRVVTLNARSHLRARVQAQSTNDGLDFQESQLVKKLVEPPPTGCQGSVISFPSPRSGPGSPAQWLLYTHPTHSWQRADLGAYLNPRPPAPEAWSEPVLLAKGSAAYSDLQSMGTGPDGSPLFGCLYEANDYEEIVFLMFTLKQAFPAEYLPQGGGGSGGGGSDKTHTCPPCPAPELLGGPSVFLFPPKPKDTLMISRTPEVTCVVVDVSHEDPEVKFNWYVDGVEVHNAKTKPREEQYNSTYRVVSVLTVLHQDWLNGKEYKCKVSNKALPAPIEKTISKAKGQPREPQVYTLPPSREEMTKNQVSLTCLVKGFYPSDIAVEWESNGQPENNYKTTPPVLDSDGSFFLTSKLTVDKSRWQQGNVFSCSVMHEALHNHYTQKSLSLSPGK

SEQ ID NO: 156 - protein, 612 aa, Artificial Sequence
  Description of Artificial Sequence: Synthetic polypeptide
DASLPYLQKESVFQSGAHAYRIPALLYLPGQQSLLAFAEQRASKKDEHAELIVLRRGDYDAGTHQVQWQAQEVVAQARLDGHRSMNPCPLYDEQTGTLFLFFIAIPGQVTEQQQLQTRANVTRLCYVTSTDHGRTWSSPRDLTDAAIGPAYREWSTFAVGPGHCLQLHDRARSLVVPAYAYRKLHPKQRPIPSAFCFLSHDHGRTWARGHFVAQDTLECQVAEVETGEQRVVTLNARSHLRARVQAQSTNDGLDFQESQLVKKLVEPPPTGCQGSVISFPSPRSGPGSPAQWLLYTHPTHSWQRADLGAYLNPRPPAPEAWSEPVLLAKGSAAYSDLQSMGTGPDGSPLFGCLYEANDYEEIVFLMFTLKQAFPAEYLPQEPKSSDKTHTCPPCPAPELLGGPSVFLFPPKPKDTLMISRTPEVTCVVVDVSHEDPEVKFNWYVDGVEVHNAKTKPREEQYNSTYRVVSVLTVLHQDWLNGKEYKCKVSNKALPAPIEKTISKAKGQPREPQVYTLPPSREEMTKNQVSLTCLVKGFYPSDIAVEWESNGQPENNYKTTPPVLDSDGSFFLTSKLTVDKSRWQQGNVFSCSVMHEALHNHYTQKSLSLSPGK

SEQ ID NO: 157 - protein, 617 aa, Artificial Sequence
  Description of Artificial Sequence: Synthetic polypeptide
DASLPYLQKESVFQSGAHAYRIPALLYLPGQQSLLAFAEQRASKKDEHAELIVLRRGDYDAGTHQVQWQAQEVVAQARLDGHRSMNPCPLYDEQTGTLFLFFIAIPGQVTEQQQLQTRANVTRLCYVTSTDHGRTWSSPRDLTDAAIGPAYREWSTFAVGPGHCLQLHDRARSLVVPAYAYRKLHPKQRPIPSAFCFLSHDHGRTWARGHFVAQDTLECQVAEVETGEQRVVTLNARSHLRARVQAQSTNDGLDFQESQLVKKLVEPPPTGCQGSVISFPSPRSGPGSPAQWLLYTHPTHSWQRADLGAYLNPRPPAPEAWSEPVLLAKGSAAYSDLQSMGTGPDGSPLFGCLYEANDYEEIVFLMFTLKQAFPAEYLPQGGGGSGGGGSDKTHTCPPCPAPELLGGPSVFLFPPKPKDTLMISRTPEVTCVVVDVSHEDPEVKFNWYVDGVEVHNAKTKPREEQYNSTYRVVSVLTVLHQDWLNGKEYKCKVSNKALPAPIEKTISKAKGQPREPQVYTLPPSREEMTKNQVSLTCLVKGFYPSDIAVEWESNGQPENNYKTTPPVLDSDGSFFLYSKLTVDKSRWQQGNVFSCSVMHEALHNHYTQKSLSLSPGK

SEQ ID NO: 158 - protein, 612 aa, Artificial Sequence
  Description of Artificial Sequence: Synthetic polypeptide
DASLPYLQKESVFQSGAHAYRIPALLYLPGQQSLLAFAEQRASKKDEHAELIVLRRGDYDAGTHQVQWQAQEVVAQARLDGHRSMNPCPLYDEQTGTLFLFFIAIPGQVTEQQQLQTRANVTRLCYVTSTDHGRTWSSPRDLTDAAIGPAYREWSTFAVGPGHCLQLHDRARSLVVPAYAYRKLHPKQRPIPSAFCFLSHDHGRTWARGHFVAQDTLECQVAEVETGEQRVVTLNARSHLRARVQAQSTNDGLDFQESQLVKKLVEPPPTGCQGSVISFPSPRSGPGSPAQWLLYTHPTHSWQRADLGAYLNPRPPAPEAWSEPVLLAKGSAAYSDLQSMGTGPDGSPLFGCLYEANDYEEIVFLMFTLKQAFPAEYLPQEPKSSDKTHTCPPCPAPELLGGPSVFLFPPKPKDTLMISRTPEVTCVVVDVSHEDPEVKFNWYVDGVEVHNAKTKPREEQYNSTYRVVSVLTVLHQDWLNGKEYKCKVSNKALPAPIEKTISKAKGQPREPQVYTLPPSREEMTKNQVSLTCLVKGFYPSDIAVEWESNGQPENNYKTTPPVLDSDGSFFLYSKLTVDKSRWQQGNVFSCSVMHEALHNHYTQKSLSLSPGK

SEQ ID NO: 159 - protein, 380 aa, Artificial Sequence
  Description of Artificial Sequence: Synthetic polypeptide
DASLPYLQKESVFQSGAHAYRIPALLYLPGQQSLLAFAEQRASKKDEHAELIVLRRGDYDAGTHQVQWQAQEVVAQARLDGHRSMNPCPLYDEQTGTLFLFFIAIPGQVTEQQQLQTRANVTRLCYVTSTDHGRTWSSPRDLTDAAIGPAYREWSTFAVGPGHCLQLHDRARSLVVPAYAYRKLHPKQRPIPSAFCFLSHDHGRTWARGHFVAQDTLECQVAEVETGEQRVVTLNARSHLRFRVQAQSTNDGLDFQESQLVKKLVEPPPTGCQGSVISFPSPRSGPGSPAQWLLYTHPTHSWQRADLGAYLNPRPPAPEAWSEPVLLAKGSAAYSDLQSMGTGPDGSPLFGCLYEANDYEEIVFLMFTLKQAFPAEYLPQ

SEQ ID NO: 160 - protein, 617 aa, Artificial Sequence
  Description of Artificial Sequence: Synthetic polypeptide
DASLPYLQKESVFQSGAHAYRIPALLYLPGQQSLLAFAEQRASKKDEHAELIVLRRGDYDAGTHQVQWQAQEVVAQARLDGHRSMNPCPLYDEQTGTLFLFFIAIPGQVTEQQQLQTRANVTRLCYVTSTDHGRTWSSPRDLTDAAIGPAYREWSTFAVGPGHCLQLHDRARSLVVPAYAYRKLHPKQRPIPSAFCFLSHDHGRTWARGHFVAQDTLECQVAEVETGEQRVVTLNARSHLRFRVQAQSTNDGLDFQESQLVKKLVEPPPTGCQGSVISFPSPRSGPGSPAQWLLYTHPTHSWQRADLGAYLNPRPPAPEAWSEPVLLAKGSAAYSDLQSMGTGPDGSPLFGCLYEANDYEEIVFLMFTLKQAFPAEYLPQGGGGSGGGGSDKTHTCPPCPAPELLGGPSVFLFPPKPKDTLMISRTPEVTCVVVDVSHEDPEVKFNWYVDGVEVHNAKTKPREEQYNSTYRVVSVLTVLHQDWLNGKEYKCKVSNKALPAPIEKTISKAKGQPREPQVYTLPPSREEMTKNQVSLTCLVKGFYPSDIAVEWESNGQPENNYKTTPPVLDSDGSFFLTSKLTVDKSRWQQGNVFSCSVMHEALHNHYTQKSLSLSPGK

SEQ ID NO: 161 - protein, 612 aa, Artificial Sequence
  Description of Artificial Sequence: Synthetic polypeptide
DASLPYLQKESVFQSGAHAYRIPALLYLPGQQSLLAFAEQRASKKDEHAELIVLRRGDYDAGTHQVQWQAQEVVAQARLDGHRSMNPCPLYDEQTGTLFLFFIAIPGQVTEQQQLQTRANVTRLCYVTSTDHGRTWSSPRDLTDAAIGPAYREWSTFAVGPGHCLQLHDRARSLVVPAYAYRKLHPKQRPIPSAFCFLSHDHGRTWARGHFVAQDTLECQVAEVETGEQRVVTLNARSHLRFRVQAQSTNDGLDFQESQLVKKLVEPPPTGCQGSVISFPSPRSGPGSPAQWLLYTHPTHSWQRADLGAYLNPRPPAPEAWSEPVLLAKGSAAYSDLQSMGTGPDGSPLFGCLYEANDYEEIVFLMFTLKQAFPAEYLPQEPKSSDKTHTCPPCPAPELLGGPSVFLFPPKPKDTLMISRTPEVTCVVVDVSHEDPEVKFNWYVDGVEVHNAKTKPREEQYNSTYRVVSVLTVLHQDWLNGKEYKCKVSNKALPAPIEKTISKAKGQPREPQVYTLPPSREEMTKNQVSLTCLVKGFYPSDIAVEWESNGQPENNYKTTPPVLDSDGSFFLTSKLTVDKSRWQQGNVFSCSVMHEALHNHYTQKSLSLSPGK

SEQ ID NO: 162 - protein, 617 aa, Artificial Sequence
  Description of Artificial Sequence: Synthetic polypeptide
DASLPYLQKESVFQSGAHAYRIPALLYLPGQQSLLAFAEQRASKKDEHAELIVLRRGDYDAGTHQVQWQAQEVVAQARLDGHRSMNPCPLYDEQTGTLFLFFIAIPGQVTEQQQLQTRANVTRLCYVTSTDHGRTWSSPRDLTDAAIGPAYREWSTFAVGPGHCLQLHDRARSLVVPAYAYRKLHPKQRPIPSAFCFLSHDHGRTWARGHFVAQDTLECQVAEVETGEQRVVTLNARSHLRFRVQAQSTNDGLDFQESQLVKKLVEPPPTGCQGSVISFPSPRSGPGSPAQWLLYTHPTHSWQRADLGAYLNPRPPAPEAWSEPVLLAKGSAAYSDLQSMGTGPDGSPLFGCLYEANDYEEIVFLMFTLKQAFPAEYLPQGGGGSGGGGSDKTHTCPPCPAPELLGGPSVFLFPPKPKDTLMISRTPEVTCVVVDVSHEDPEVKFNWYVDGVEVHNAKTKPREEQYNSTYRVVSVLTVLHQDWLNGKEYKCKVSNKALPAPIEKTISKAKGQPREPQVYTLPPSREEMTKNQVSLTCLVKGFYPSDIAVEWESNGQPENNYKTTPPVLDSDGSFFLYSKLTVDKSRWQQGNVFSCSVMHEALHNHYTQKSLSLSPGK

SEQ ID NO: 163 - protein, 612 aa, Artificial Sequence
  Description of Artificial Sequence: Synthetic polypeptide
DASLPYLQKESVFQSGAHAYRIPALLYLPGQQSLLAFAEQRASKKDEHAELIVLRRGDYDAGTHQVQWQAQEVVAQARLDGHRSMNPCPLYDEQTGTLFLFFIAIPGQVTEQQQLQTRANVTRLCYVTSTDHGRTWSSPRDLTDAAIGPAYREWSTFAVGPGHCLQLHDRARSLVVPAYAYRKLHPKQRPIPSAFCFLSHDHGRTWARGHFVAQDTLECQVAEVETGEQRVVTLNARSHLRFRVQAQSTNDGLDFQESQLVKKLVEPPPTGCQGSVISFPSPRSGPGSPAQWLLYTHPTHSWQRADLGAYLNPRPPAPEAWSEPVLLAKGSAAYSDLQSMGTGPDGSPLFGCLYEANDYEEIVFLMFTLKQAFPAEYLPQEPKSSDKTHTCPPCPAPELLGGPSVFLFPPKPKDTLMISRTPEVTCVVVDVSHEDPEVKFNWYVDGVEVHNAKTKPREEQYNSTYRVVSVLTVLHQDWLNGKEYKCKVSNKALPAPIEKTISKAKGQPREPQVYTLPPSREEMTKNQVSLTCLVKGFYPSDIAVEWESNGQPENNYKTTPPVLDSDGSFFLYSKLTVDKSRWQQGNVFSCSVMHEALHNHYTQKSLSLSPGK

SEQ ID NO: 164 - protein, 617 aa, Artificial Sequence
  Description of Artificial Sequence: Synthetic polypeptide
  MOD_RES (1)..(1): Ala, Arg, Asn, Asp, Gln, Glu, Gly, His, Leu, Lys, Met, Phe, Thr, Val, or not present
  MOD_RES (6)..(6): Phe, Trp, Tyr or Val
  MOD_RES (9)..(9): Lys or Asp
  MOD_RES (62)..(62): Pro, Asn, Asp, His, Glu, Gly, Ser or Thr
  MOD_RES (93)..(93): Ala, Glu, or Lys
  MOD_RES (126)..(126): Gln, Leu, Glu, Phe, His, Ile, Leu, or Tyr
  MOD_RES (187)..(187): Arg, Ile, or Lys
  MOD_RES (242)..(242): Ala, Cys, Phe, Gly, His, Ile, Lys, Leu, Met, Asn, Gln, Arg, Ser, Val, Trp, or Tyr
  MOD_RES (270)..(270): Gln, Ala, His, Phe, Pro, Ser, or Thr
  MOD_RES (301)..(301): Ser, Arg, Ala, Asp, Glu, Phe, Gly, His, Ile, Lys, Leu, Met, Asn, Pro, Gln, Thr, Val, Trp, or Tyr
  MOD_RES (302)..(302): Trp, Lys, Ala, Asp, Glu, Phe, Gly, His, Ile, Lys, Leu, Met, Asn, Pro, Gln, Arg, Ser, Thr, Val, or Tyr
  MOD_RES (332)..(332): Ala, Cys, Ser, or Val
  MOD_RES (363)..(363): Val or Arg
  MOD_RES (365)..(365): Leu, Gln, His, Ile, Lys, or Ser
  MOD_RES (381)..(390): This region may encompass "GGGGS", "GGGGSGGGGS" or "EPKSS"
  See specification as filed for detailed description of substitutions and preferred embodiments
XASLPXLQXESVFQSGAHAYRIPALLYLPGQQSLLAFAEQRASKKDEHAELIVLRRGDYDAXTHQVQWQAQEVVAQARLDGHRSMNPCPLYDXQTGTLFLFFIAIPGQVTEQQQLQTRANVTRLCXVTSTDHGRTWSSPRDLTDAAIGPAYREWSTFAVGPGHCLQLHDRARSLVVPAYAYRKLHPXQRPIPSAFCFLSHDHGRTWARGHFVAQDTLECQVAEVETGEQRVVTLNARSHLRXRVQAQSTNDGLDFQESQLVKKLVEPPPXGCQGSVISFPSPRSGPGSPAQWLLYTHPTHXXQRADLGAYLNPRPPAPEAWSEPVLLAKGSXAYSDLQSMGTGPDGSPLFGCLYEANDYEEIXFXMFTLKQAFPAEYLPQXXXXXXXXXXDKTHTCPPCPAPELLGGPSVFLFPPKPKDTLMISRTPEVTCVVVDVSHEDPEVKFNWYVDGVEVHNAKTKPREEQYNSTYRVVSVLTVLHQDWLNGKEYKCKVSNKALPAPIEKTISKAKGQPREPQVYTLPPSREEMTKNQVSLTCLVKGFYPSDIAVEWESNGQPENNYKTTPPVLDSDGSFFLTSKLTVDKSRWQQGNVFSCSVMHEALHNHYTQKSLSLSPGK

SEQ ID NO: 165 - protein, 617 aa, Artificial Sequence
  Description of Artificial Sequence: Synthetic polypeptide
  MOD_RES (1)..(1): Ala, Arg, Asn, Asp, Gln, Glu, Gly, His, Leu, Lys, Met, Phe, Thr, Val, or not present
  MOD_RES (2)..(2): Ala or Lys
  MOD_RES (4)..(4): Asn or Leu
  MOD_RES (5)..(5): Pro or His
  MOD_RES (6)..(6): Phe, Trp, Tyr or Val
  MOD_RES (9)..(9): Lys or Asp
  MOD_RES (44)..(44): Lys, Arg, or Glu
  MOD_RES (45)..(45): Lys, Ala, Arg, or Glu
  MOD_RES (54)..(54): Leu or Met
  MOD_RES (62)..(62): Pro, Asn, Asp, His, Glu, Gly, Ser or Thr
  MOD_RES (69)..(69): Gln or His
  MOD_RES (78)..(78): Arg or Lys
  MOD_RES (80)..(80): Asp or Pro
  MOD_RES (93)..(93): Ala, Glu or Lys
  MOD_RES (107)..(107): Gly or Asp
  MOD_RES (108)..(108): Gln or His
  MOD_RES (112)..(112): Gln, Arg, or Lys
  MOD_RES (125)..(125): Ala, Cys, Ile, Ser, Val, or Leu
  MOD_RES (126)..(126): Gln, Leu, Glu, Phe, His, Ile, Leu, or Tyr
  MOD_RES (150)..(150): Ala or Val
  MOD_RES (164)..(164): Cys or Gly
  MOD_RES (170)..(170): Arg or Pro
  MOD_RES (171)..(171): Ala or Gly
  MOD_RES (187)..(187): Arg, Ile, or Lys
  MOD_RES (188)..(188): Gln or Pro
  MOD_RES (189)..(189): Arg or Pro
  MOD_RES (196)..(196): Ala, Cys, Leu, or Val
  MOD_RES (213)..(213): Ala, Cys, Asn, Ser, or Thr
  MOD_RES (217)..(217): Leu, Ala, or Val
  MOD_RES (225)..(225): Glu or Pro
  MOD_RES (239)..(239): His or Pro
  MOD_RES (240)..(240): Leu, Asp, Asn, or Tyr
  MOD_RES (241)..(241): Arg, Ala, Asp, Leu, Gln, or Tyr
  MOD_RES (242)..(242): Ala, Cys, Phe, Gly, His, Ile, Lys, Leu, Met, Asn, Gln, Arg, Ser, Val, Trp, or Tyr
  MOD_RES (244)..(244): Val, Ile, or Lys
  MOD_RES (249)..(249): Thr or Ala
  MOD_RES (251)..(251): Asp or Gly
  MOD_RES (257)..(257): Glu, Lys, or Pro
  MOD_RES (258)..(258): Ser or Cys
  MOD_RES (260)..(260): Leu, Asp, Phe, Gln, or Thr
  MOD_RES (265)..(265): Val or Phe
  MOD_RES (270)..(270): Gln, Ala, His, Phe, Pro, Ser, or Thr
  MOD_RES (272)..(272): Cys or Val
  MOD_RES (292)..(292): Trp or Arg
  MOD_RES (301)..(301): Ser, Arg, Ala, Asp, Glu, Phe, Gly, His, Ile, Lys, Leu, Met, Asn, Pro, Gln, Thr, Val, Trp, or Tyr
  MOD_RES (302)..(302): Trp, Lys, Ala, Asp, Glu, Phe, Gly, His, Ile, Lys, Leu, Met, Asn, Pro, Gln, Arg, Ser, Thr, Val, or Tyr
  MOD_RES (325)..(325): Lys or Val
  MOD_RES (332)..(332): Ala, Cys, Ser, or Val
  MOD_RES (352)..(352): Cys, Leu, or Val
  MOD_RES (363)..(363): Val or Arg
  MOD_RES (365)..(365): Leu, Gln, His, Ile, Lys, or Ser
  MOD_RES (381)..(390): This region may encompass "GGGGS", "GGGGSGGGGS" or "EPKSS"
  See specification as filed for detailed description of substitutions and preferred embodiments
XXSXXXLQXESVFQSGAHAYRIPALLYLPGQQSLLAFAEQRASXXDEHAELIVXRRGDYDAXTHQVQWXAQEVVAQAXLXGHRSMNPCPLYDXQTGTLFLFFIAIPXXVTEXQQLQTRANVTRLXXVTSTDHGRTWSSPRDLTDAAIGPXYREWSTFAVGPGHXLQLHDXXRSLVVPAYAYRKLHPXXXPIPSAFXFLSHDHGRTWARGHFVXQDTXECQVAEVXTGEQRVVTLNARSXXXXRXQAQSXNXGLDFQXXQXVKKLXEPPPXGXQGSVISFPSPRSGPGSPAQXLLYTHPTHXXQRADLGAYLNPRPPAPEAWSEPXLLAKGSXAYSDLQSMGTGPDGSPLFGXLYEANDYEEIXFXMFTLKQAFPAEYLPQXXXXXXXXXXDKTHTCPPCPAPELLGGPSVFLFPPKPKDTLMISRTPEVTCVVVDVSHEDPEVKFNWYVDGVEVHNAKTKPREEQYNSTYRVVSVLTVLHQDWLNGKEYKCKVSNKALPAPIEKTISKAKGQPREPQVYTLPPSREEMTKNQVSLTCLVKGFYPSDIAVEWESNGQPENNYKTTPPVLDSDGSFFLTSKLTVDKSRWQQGNVFSCSVMHEALHNHYTQKSLSLSPGK

SEQ ID NO: 166 - protein, 874 aa, Artificial Sequence
  Description of Artificial Sequence: Synthetic polypeptide
DASLPYLQKESVFQSGAHAYRIPALLYLPGQQSLLAFAEQRASKKDEHAELIVLRRGDYDAGTHQVQWQAQEVVAQARLDGHRSMNPCPLYDEQTGTLFLFFIAIPGQVTEQQQLQTRANVTRLCQVTSTDHGRTWSSPRDLTDAAIGPAYREWSTFAVGPGHCLQLHDRARSLVVPAYAYRKLHPKQRPIPSAFCFLSHDHGRTWARGHFVAQDTLECQVAEVETGEQRVVTLNARSHLRARVQAQSTNDGLDFQESQLVKKLVEPPPQGCQGSVISFPSPRSGPGSPAQWLLYTHPTHARQRADLGAYLNPRPPAPEAWSEPVLLAKGSAAYSDLQSMGTGPDGSPLFGCLYEANDYEEIVFLMFTLKQAFPAEYLPQGGGGSGGGGSDKTHTCPPCPAPELLGGPSVFLFPPKPKDTLMISRTPEVTCVVVDVSHEDPEVKFNWYVDGVEVHNAKTKPREEQYNSTYRVVSVLTVLHQDWLNGKEYKCKVSNKALPAPIEKTISKAKGQPREPQVYTLPPSREEMTKNQVSLTCLVKGFYPSDIAVEWESNGQPENNYKTTPPVLDSDGSFFLYSKLTVDKSRWQQGNVFSCSVMHEALHNHYTQKSLSLSPGKGGGGSGGGGSGGGGSEVQLVESGGGLVQPGGSLRLSCAASGFNIKDTYIHWVRQAPGKGLEWVARIYPTNGYTRYADSVKGRFTISADTSKNTAYLQMNSLRAEDTAVYYCSRWGGDGFYAMDYWGQGTLVTVSSGGGGSGGGGSGGGGSDIQMTQSPSSLSASVGDRVTITCRASQDVNTAVAWYQQKPGKAPKLLIYSASFLYSGVPSRFSGSRSGTDFTLTISSLQPEDFATYYCQQHYTTPPTFGQGTKVEIK

SEQ ID NO: 167 - protein, 874 aa, Artificial Sequence
  Description of Artificial Sequence: Synthetic polypeptide
DASLPYLQKESVFQSGAHAYRIPALLYLPGQQSLLAFAEQRASKKDEHAELIVLRRGDYDAGTHQVQWQAQEVVAQARLDGHRSMNPCPLYDEQTGTLFLFFIAIPGQVTEQQQLQTRANVTRLCYVTSTDHGRTWSSPRDLTDAAIGPAYREWSTFAVGPGHCLQLHDRARSLVVPAYAYRKLHPKQRPIPSAFCFLSHDHGRTWARGHFVAQDTLECQVAEVETGEQRVVTLNARSHLRARVQAQSTNDGLDFQESQLVKKLVEPPPTGCQGSVISFPSPRSGPGSPAQWLLYTHPTHSWQRADLGAYLNPRPPAPEAWSEPVLLAKGSAAYSDLQSMGTGPDGSPLFGCLYEANDYEEIVFLMFTLKQAFPAEYLPQGGGGSGGGGSDKTHTCPPCPAPELLGGPSVFLFPPKPKDTLMISRTPEVTCVVVDVSHEDPEVKFNWYVDGVEVHNAKTKPREEQYNSTYRVVSVLTVLHQDWLNGKEYKCKVSNKALPAPIEKTISKAKGQPREPQVYTLPPSREEMTKNQVSLTCLVKGFYPSDIAVEWESNGQPENNYKTTPPVLDSDGSFFLYSKLTVDKSRWQQGNVFSCSVMHEALHNHYTQKSLSLSPGKGGGGSGGGGSGGGGSEVQLVESGGGLVQPGGSLRLSCAASGFNIKDTYIHWVRQAPGKGLEWVARIYPTNGYTRYADSVKGRFTISADTSKNTAYLQMNSLRAEDTAVYYCSRWGGDGFYAMDYWGQGTLVTVSSGGGGSGGGGSGGGGSDIQMTQSPSSLSASVGDRVTITCRASQDVNTAVAWYQQKPGKAPKLLIYSASFLYSGVPSRFSGSRSGTDFTLTISSLQPEDFATYYCQQHYTTPPTFGQGTKVEIK

SEQ ID NO: 168 - protein, 874 aa, Artificial Sequence
  Description of Artificial Sequence: Synthetic polypeptide
DASLPYLQKESVFQSGAHAYRIPALLYLPGQQSLLAFAEQRASKKDEHAELIVLRRGDYDAGTHQVQWQAQEVVAQARLDGHRSMNPCPLYDEQTGTLFLFFIAIPGQVTEQQQLQTRANVTRLCYVTSTDHGRTWSSPRDLTDAAIGPAYREWSTFAVGPGHCLQLHDRARSLVVPAYAYRKLHPKQRPIPSAFCFLSHDHGRTWARGHFVAQDTLECQVAEVETGEQRVVTLNARSHLRFRVQAQSTNDGLDFQESQLVKKLVEPPPTGCQGSVISFPSPRSGPGSPAQWLLYTHPTHSWQRADLGAYLNPRPPAPEAWSEPVLLAKGSAAYSDLQSMGTGPDGSPLFGCLYEANDYEEIVFLMFTLKQAFPAEYLPQGGGGSGGGGSDKTHTCPPCPAPELLGGPSVFLFPPKPKDTLMISRTPEVTCVVVDVSHEDPEVKFNWYVDGVEVHNAKTKPREEQYNSTYRVVSVLTVLHQDWLNGKEYKCKVSNKALPAPIEKTISKAKGQPREPQVYTLPPSREEMTKNQVSLTCLVKGFYPSDIAVEWESNGQPENNYKTTPPVLDSDGSFFLYSKLTVDKSRWQQGNVFSCSVMHEALHNHYTQKSLSLSPGKGGGGSGGGGSGGGGSEVQLVESGGGLVQPGGSLRLSCAASGFNIKDTYIHWVRQAPGKGLEWVARIYPTNGYTRYADSVKGRFTISADTSKNTAYLQMNSLRAEDTAVYYCSRWGGDGFYAMDYWGQGTLVTVSSGGGGSGGGGSGGGGSDIQMTQSPSSLSASVGDRVTITCRASQDVNTAVAWYQQKPGKAPKLLIYSASFLYSGVPSRFSGSRSGTDFTLTISSLQPEDFATYYCQQHYTTPPTFGQGTKVEIK

SEQ ID NO: 169 - protein, 869 aa, Artificial Sequence
  Description of Artificial Sequence: Synthetic polypeptide
DASLPYLQKESVFQSGAHAYRIPALLYLPGQQSLLAFAEQRASKKDEHAELIVLRRGDYDAGTHQVQWQAQEVVAQARLDGHRSMNPCPLYDEQTGTLFLFFIAIPGQVTEQQQLQTRANVTRLCQVTSTDHGRTWSSPRDLTDAAIGPAYREWSTFAVGPGHCLQLHDRARSLVVPAYAYRKLHPKQRPIPSAFCFLSHDHGRTWARGHFVAQDTLECQVAEVETGEQRVVTLNARSHLRARVQAQSTNDGLDFQESQLVKKLVEPPPQGCQGSVISFPSPRSGPGSPAQWLLYTHPTHSWQRADLGAYLNPRPPAPEAWSEPVLLAKGSAAYSDLQSMGTGPDGSPLFGCLYEANDYEEIVFLMFTLKQAFPAEYLPQEPKSSDKTHTCPPCPAPELLGGPSVFLFPPKPKDTLMISRTPEVTCVVVDVSHEDPEVKFNWYVDGVEVHNAKTKPREEQYNSTYRVVSVLTVLHQDWLNGKEYKCKVSNKALPAPIEKTISKAKGQPREPQVYTLPPSREEMTKNQVSLTCLVKGFYPSDIAVEWESNGQPENNYKTTPPVLDSDGSFFLYSKLTVDKSRWQQGNVFSCSVMHEALHNHYTQKSLSLSPGKGGGGSGGGGSGGGGSEVQLVESGGGLVQPGGSLRLSCAASGFNIKDTYIHWVRQAPGKGLEWVARIYPTNGYTRYADSVKGRFTISADTSKNTAYLQMNSLRAEDTAVYYCSRWGGDGFYAMDYWGQGTLVTVSSGGGGSGGGGSGGGGSDIQMTQSPSSLSASVGDRVTITCRASQDVNTAVAWYQQKPGKAPKLLIYSASFLYSGVPSRFSGSRSGTDFTLTISSLQPEDFATYYCQQHYTTPPTFGQGTKVEIK

SEQ ID NO: 170 - protein, 869 aa, Artificial Sequence
  Description of Artificial Sequence: Synthetic polypeptide
DASLPYLQDESVFQSGAHAYRIPALLYLPGQQSLLAFAEQRASKKDEHAELIVLRRGDYDAPTHQVQWQAQEVVAQARLDGHRSMNPCPLYDEQTGTLFLFFIAIPGQVTEQQQLQTRANVTRLCQVTSTDHGRTWSSPRDLTDAAIGPAYREWSTFAVGPGHCLQLHDRARSLVVPAYAYRKLHPKQRPIPSAFCFLSHDHGRTWARGHFVAQDTLECQVAEVETGEQRVVTLNARSHLRARVQAQSTNDGLDFQESQLVKKLVEPPPQGCQGSVISFPSPRSGPGSPAQWLLYTHPTHSWQRADLGAYLNPRPPAPEAWSEPVLLAKGSAAYSDLQSMGTGPDGSPLFGCLYEANDYEEIRFIMFTLKQAFPAEYLPQEPKSSDKTHTCPPCPAPELLGGPSVFLFPPKPKDTLMISRTPEVTCVVVDVSHEDPEVKFNWYVDGVEVHNAKTKPREEQYNSTYRVVSVLTVLHQDWLNGKEYKCKVSNKALPAPIEKTISKAKGQPREPQVYTLPPSREEMTKNQVSLTCLVKGFYPSDIAVEWESNGQPENNYKTTPPVLDSDGSFFLYSKLTVDKSRWQQGNVFSCSVMHEALHNHYTQKSLSLSPGKGGGGSGGGGSGGGGSEVQLVESGGGLVQPGGSLRLSCAASGFNIKDTYIHWVRQAPGKGLEWVARIYPTNGYTRYADSVKGRFTISADTSKNTAYLQMNSLRAEDTAVYYCSRWGGDGFYAMDYWGQGTLVTVSSGGGGSGGGGSGGGGSDIQMTQSPSSLSASVGDRVTITCRASQDVNTAVAWYQQKPGKAPKLLIYSASFLYSGVPSRFSGSRSGTDFTLTISSLQPEDFATYYCQQHYTTPPTFGQGTKVEIK

SEQ ID NO: 171 - protein, 869 aa, Artificial Sequence
  Description of Artificial Sequence: Synthetic polypeptide
DASLPYLQKESVFQSGAHAYRIPALLYLPGQQSLLAFAEQRASKKDEHAELIVLRRGDYDANTHQVQWQAQEVVAQARLDGHRSMNPCPLYDAQTGTLFLFFIAIPGQVTEQQQLQTRANVTRLCQVTSTDHGRTWSSPRDLTDAAIGPAYREWSTFAVGPGHCLQLHDRARSLVVPAYAYRKLHPKQRPIPSAFCFLSHDHGRTWARGHFVAQDTLECQVAEVETGEQRVVTLNARSHLRARVQAQSTNDGLDFQESQLVKKLVEPPPQGCQGSVISFPSPRSGPGSPAQWLLYTHPTHSWQRADLGAYLNPRPPAPEAWSEPVLLAKGSAAYSDLQSMGTGPDGSPLFGCLYEANDYEEIVFLMFTLKQAFPAEYLPQEPKSSDKTHTCPPCPAPELLGGPSVFLFPPKPKDTLMISRTPEVTCVVVDVSHEDPEVKFNWYVDGVEVHNAKTKPREEQYNSTYRVVSVLTVLHQDWLNGKEYKCKVSNKALPAPIEKTISKAKGQPREPQVYTLPPSREEMTKNQVSLTCLVKGFYPSDIAVEWESNGQPENNYKTTPPVLDSDGSFFLYSKLTVDKSRWQQGNVFSCSVMHEALHNHYTQKSLSLSPGKGGGGSGGGGSGGGGSEVQLVESGGGLVQPGGSLRLSCAASGFNIKDTYIHWVRQAPGKGLEWVARIYPTNGYTRYADSVKGRFTISADTSKNTAYLQMNSLRAEDTAVYYCSRWGGDGFYAMDYWGQGTLVTVSSGGGGSGGGGSGGGGSDIQMTQSPSSLSASVGDRVTITCRASQDVNTAVAWYQQKPGKAPKLLIYSASFLYSGVPSRFSGSRSGTDFTLTISSLQPEDFATYYCQQHYTTPPTFGQGTKVEIK

SEQ ID NO: 172 - protein, 869 aa, Artificial Sequence
  Description of Artificial Sequence: Synthetic polypeptide
DASLPYLQKESVFQSGAHAYRIPALLYLPGQQSLLAFAEQRASKKDEHAELIVLRRGDYDAPTHQVQWQAQEVVAQARLDGHRSMNPCPLYDAQTGTLFLFFIAIPGQVTEQQQLQTRANVTRLCQVTSTDHGRTWSSPRDLTDAAIGPAYREWSTFAVGPGHCLQLHDRARSLVVPAYAYRKLHPKQRPIPSAFCFLSHDHGRTWARGHFVAQDTLECQVAEVETGEQRVVTLNARSHLRARVQAQSTNDGLDFQESQLVKKLVEPPPAGCQGSVISFPSPRSGPGSPAQWLLYTHPTHRKQRADLGAYLNPRPPAPEAWSEPVLLAKGSAAYSDLQSMGTGPDGSPLFGCLYEANDYEEIVFLMFTLKQAFPAEYLPQEPKSSDKTHTCPPCPAPELLGGPSVFLFPPKPKDTLMISRTPEVTCVVVDVSHEDPEVKFNWYVDGVEVHNAKTKPREEQYNSTYRVVSVLTVLHQDWLNGKEYKCKVSNKALPAPIEKTISKAKGQPREPQVYTLPPSREEMTKNQVSLTCLVKGFYPSDIAVEWESNGQPENNYKTTPPVLDSDGSFFLYSKLTVDKSRWQQGNVFSCSVMHEALHNHYTQKSLSLSPGKGGGGSGGGGSGGGGSEVQLVESGGGLVQPGGSLRLSCAASGFNIKDTYIHWVRQAPGKGLEWVARIYPTNGYTRYADSVKGRFTISADTSKNTAYLQMNSLRAEDTAVYYCSRWGGDGFYAMDYWGQGTLVTVSSGGGGSGGGGSGGGGSDIQMTQSPSSLSASVGDRVTITCRASQDVNTAVAWYQQKPGKAPKLLIYSASFLYSGVPSRFSGSRSGTDFTLTISSLQPEDFATYYCQQHYTTPPTFGQGTKVEIK

SEQ ID NO: 173 - protein, 869 aa, Artificial Sequence
  Description of Artificial Sequence: Synthetic polypeptide
DASLPYLQKESVFQSGAHAYRIPALLYLPGQQSLLAFAEQRASKKDEHAELIVLRRGDYDASTHQVQWQAQEVVAQARLDGHRSMNPCPLYDAQTGTLFLFFIAIPGQVTEQQQLQTRANVTRLCQVTSTDHGRTWSSPRDLTDAAIGPAYREWSTFAVGPGHCLQLHDRARSLVVPAYAYRKLHPKQRPIPSAFCFLSHDHGRTWARGHFVAQDTLECQVAEVETGEQRVVTLNARSHLRARVQAQSTNDGLDFQESQLVKKLVEPPPAGCQGSVISFPSPRSGPGSPAQWLLYTHPTHRKQRADLGAYLNPRPPAPEAWSEPVLLAKGSAAYSDLQSMGTGPDGSPLFGCLYEANDYEEIVFLMFTLKQAFPAEYLPQEPKSSDKTHTCPPCPAPELLGGPSVFLFPPKPKDTLMISRTPEVTCVVVDVSHEDPEVKFNWYVDGVEVHNAKTKPREEQYNSTYRVVSVLTVLHQDWLNGKEYKCKVSNKALPAPIEKTISKAKGQPREPQVYTLPPSREEMTKNQVSLTCLVKGFYPSDIAVEWESNGQPENNYKTTPPVLDSDGSFFLYSKLTVDKSRWQQGNVFSCSVMHEALHNHYTQKSLSLSPGKGGGGSGGGGSGGGGSEVQLVESGGGLVQPGGSLRLSCAASGFNIKDTYIHWVRQAPGKGLEWVARIYPTNGYTRYADSVKGRFTISADTSKNTAYLQMNSLRAEDTAVYYCSRWGGDGFYAMDYWGQGTLVTVSSGGGGSGGGGSGGGGSDIQMTQSPSSLSASVGDRVTITCRASQDVNTAVAWYQQKPGKAPKLLIYSASFLYSGVPSRFSGSRSGTDFTLTISSLQPEDFATYYCQQHYTTPPTFGQGTKVEIK

SEQ ID NO: 174 - protein, 869 aa, Artificial Sequence
  Description of Artificial Sequence: Synthetic polypeptide
DASLPYLQKESVFQSGAHAYRIPALLYLPGQQSLLAFAEQRASKKDEHAELIVLRRGDYDATTHQVQWQAQEVVAQARLDGHRSMNPCPLYDAQTGTLFLFFIAIPGQVTEQQQLQTRANVTRLCQVTSTDHGRTWSSPRDLTDAAIGPAYREWSTFAVGPGHCLQLHDRARSLVVPAYAYRKLHPKQRPIPSAFCFLSHDHGRTWARGHFVAQDTLECQVAEVETGEQRVVTLNARSHLRARVQAQSTNDGLDFQESQLVKKLVEPPPAGCQGSVISFPSPRSGPGSPAQWLLYTHPTHRKQRADLGAYLNPRPPAPEAWSEPVLLAKGSAAYSDLQSMGTGPDGSPLFGCLYEANDYEEIVFLMFTLKQAFPAEYLPQEPKSSDKTHTCPPCPAPELLGGPSVFLFPPKPKDTLMISRTPEVTCVVVDVSHEDPEVKFNWYVDGVEVHNAKTKPREEQYNSTYRVVSVLTVLHQDWLNGKEYKCKVSNKALPAPIEKTISKAKGQPREPQVYTLPPSREEMTKNQVSLTCLVKGFYPSDIAVEWESNGQPENNYKTTPPVLDSDGSFFLYSKLTVDKSRWQQGNVFSCSVMHEALHNHYTQKSLSLSPGKGGGGSGGGGSGGGGSEVQLVESGGGLVQPGGSLRLSCAASGFNIKDTYIHWVRQAPGKGLEWVARIYPTNGYTRYADSVKGRFTISADTSKNTAYLQMNSLRAEDTAVYYCSRWGGDGFYAMDYWGQGTLVTVSSGGGGSGGGGSGGGGSDIQMTQSPSSLSASVGDRVTITCRASQDVNTAVAWYQQKPGKAPKLLIYSASFLYSGVPSRFSGSRSGTDFTLTISSLQPEDFATYYCQQHYTTPPTFGQGTKVEIK

SEQ ID NO: 175 - protein, 869 aa, Artificial Sequence
  Description of Artificial Sequence: Synthetic polypeptide
DASLPYLQKESVFQSGAHAYRIPALLYLPGQQSLLAFAEQRASKKDEHAELIVLRRGDYDANTHQVQWQAQEVVAQARLDGHRSMNPCPLYDAQTGTLFLFFIAIPGQVTEQQQLQTRANVTRLCQVTSTDHGRTWSSPRDLTDAAIGPAYREWSTFAVGPGHCLQLHDRARSLVVPAYAYRKLHPKQRPIPSAFCFLSHDHGRTWARGHFVAQDTLECQVAEVETGEQRVVTLNARSHLRARVQAQSTNDGLDFQESQLVKKLVEPPPAGCQGSVISFPSPRSGPGSPAQWLLYTHPTHRKQRADLGAYLNPRPPAPEAWSEPVLLAKGSAAYSDLQSMGTGPDGSPLFGCLYEANDYEEIVFLMFTLKQAFPAEYLPQEPKSSDKTHTCPPCPAPELLGGPSVFLFPPKPKDTLMISRTPEVTCVVVDVSHEDPEVKFNWYVDGVEVHNAKTKPREEQYNSTYRVVSVLTVLHQDWLNGKEYKCKVSNKALPAPIEKTISKAKGQPREPQVYTLPPSREEMTKNQVSLTCLVKGFYPSDIAVEWESNGQPENNYKTTPPVLDSDGSFFLYSKLTVDKSRWQQGNVFSCSVMHEALHNHYTQKSLSLSPGKGGGGSGGGGSGGGGSEVQLVESGGGLVQPGGSLRLSCAASGFNIKDTYIHWVRQAPGKGLEWVARIYPTNGYTRYADSVKGRFTISADTSKNTAYLQMNSLRAEDTAVYYCSRWGGDGFYAMDYWGQGTLVTVSSGGGGSGGGGSGGGGSDIQMTQSPSSLSASVGDRVTITCRASQDVNTAVAWYQQKPGKAPKLLIYSASFLYSGVPSRFSGSRSGTDFTLTISSLQPEDFATYYCQQHYTTPPTFGQGTKVEIK

SEQ ID NO: 176 - protein, 869 aa, Artificial Sequence
  Description of Artificial Sequence: Synthetic polypeptide
DASLPYLQKESVFQSGAHAYRIPALLYLPGQQSLLAFAEQRASKKDEHAELIVLRRGDYDAGTHQVQWQAQEVVAQARLDGHRSMNPCPLYDEQTGTLFLFFIAIPGQVTEQQQLQTRANVTRLCQVTSTDHGRTWSSPRDLTDAAIGPAYREWSTFAVGPGHCLQLHDRARSLVVPAYAYRKLHPKQRPIPSAFCFLSHDHGRTWARGHFVAQDTLECQVAEVETGEQRVVTLNARSHLRARVQAQSTNDGLDFQESQLVKKLVEPPPQGCQGSVISFPSPRSGPGSPAQWLLYTHPTHARQRADLGAYLNPRPPAPEAWSEPVLLAKGSAAYSDLQSMGTGPDGSPLFGCLYEANDYEEIVFLMFTLKQAFPAEYLPQEPKSSDKTHTCPPCPAPELLGGPSVFLFPPKPKDTLMISRTPEVTCVVVDVSHEDPEVKFNWYVDGVEVHNAKTKPREEQYNSTYRVVSVLTVLHQDWLNGKEYKCKVSNKALPAPIEKTISKAKGQPREPQVYTLPPSREEMTKNQVSLTCLVKGFYPSDIAVEWESNGQPENNYKTTPPVLDSDGSFFLYSKLTVDKSRWQQGNVFSCSVMHEALHNHYTQKSLSLSPGKGGGGSGGGGSGGGGSEVQLVESGGGLVQPGGSLRLSCAASGFNIKDTYIHWVRQAPGKGLEWVARIYPTNGYTRYADSVKGRFTISADTSKNTAYLQMNSLRAEDTAVYYCSRWGGDGFYAMDYWGQGTLVTVSSGGGGSGGGGSGGGGSDIQMTQSPSSLSASVGDRVTITCRASQDVNTAVAWYQQKPGKAPKLLIYSASFLYSGVPSRFSGSRSGTDFTLTISSLQPEDFATYYCQQHYTTPPTFGQGTKVEIK

SEQ ID NO: 177 - protein, 869 aa, Artificial Sequence
  Description of Artificial Sequence: Synthetic polypeptide
DASLPYLQKESVFQSGAHAYRIPALLYLPGQQSLLAFAEQRASKKDEHAELIVLRRGDYDAGTHQVQWQAQEVVAQARLDGHRSMNPCPLYDEQTGTLFLFFIAIPGQVTEQQQLQTRANVTRLCYVTSTDHGRTWSSPRDLTDAAIGPAYREWSTFAVGPGHCLQLHDRARSLVVPAYAYRKLHPKQRPIPSAFCFLSHDHGRTWARGHFVAQDTLECQVAEVETGEQRVVTLNARSHLRARVQAQSTNDGLDFQESQLVKKLVEPPPTGCQGSVISFPSPRSGPGSPAQWLLYTHPTHSWQRADLGAYLNPRPPAPEAWSEPVLLAKGSAAYSDLQSMGTGPDGSPLFGCLYEANDYEEIVFLMFTLKQAFPAEYLPQEPKSSDKTHTCPPCPAPELLGGPSVFLFPPKPKDTLMISRTPEVTCVVVDVSHEDPEVKFNWYVDGVEVHNAKTKPREEQYNSTYRVVSVLTVLHQDWLNGKEYKCKVSNKALPAPIEKTISKAKGQPREPQVYTLPPSREEMTKNQVSLTCLVKGFYPSDIAVEWESNGQPENNYKTTPPVLDSDGSFFLYSKLTVDKSRWQQGNVFSCSVMHEALHNHYTQKSLSLSPGKGGGGSGGGGSGGGGSEVQLVESGGGLVQPGGSLRLSCAASGFNIKDTYIHWVRQAPGKGLEWVARIYPTNGYTRYADSVKGRFTISADTSKNTAYLQMNSLRAEDTAVYYCSRWGGDGFYAMDYWGQGTLVTVSSGGGGSGGGGSGGGGSDIQMTQSPSSLSASVGDRVTITCRASQDVNTAVAWYQQKPGKAPKLLIYSASFLYSGVPSRFSGSRSGTDFTLTISSLQPEDFATYYCQQHYTTPPTFGQGTKVEIK

SEQ ID NO: 178 - protein, 869 aa, Artificial Sequence
  Description of Artificial Sequence: Synthetic polypeptide
DASLPYLQKESVFQSGAHAYRIPALLYLPGQQSLLAFAEQRASKKDEHAELIVLRRGDYDAGTHQVQWQAQEVVAQARLDGHRSMNPCPLYDEQTGTLFLFFIAIPGQVTEQQQLQTRANVTRLCYVTSTDHGRTWSSPRDLTDAAIGPAYREWSTFAVGPGHCLQLHDRARSLVVPAYAYRKLHPKQRPIPSAFCFLSHDHGRTWARGHFVAQDTLECQVAEVETGEQRVVTLNARSHLRFRVQAQSTNDGLDFQESQLVKKLVEPPPTGCQGSVISFPSPRSGPGSPAQWLLYTHPTHSWQRADLGAYLNPRPPAPEAWSEPVLLAKGSAAYSDLQSMGTGPDGSPLFGCLYEANDYEEIVFLMFTLKQAFPAEYLPQEPKSSDKTHTCPPCPAPELLGGPSVFLFPPKPKDTLMISRTPEVTCVVVDVSHEDPEVKFNWYVDGVEVHNAKTKPREEQYNSTYRVVSVLTVLHQDWLNGKEYKCKVSNKALPAPIEKTISKAKGQPREPQVYTLPPSREEMTKNQVSLTCLVKGFYPSDIAVEWESNGQPENNYKTTPPVLDSDGSFFLYSKLTVDKSRWQQGNVFSCSVMHEALHNHYTQKSLSLSPGKGGGGSGGGGSGGGGSEVQLVESGGGLVQPGGSLRLSCAASGFNIKDTYIHWVRQAPGKGLEWVARIYPTNGYTRYADSVKGRFTISADTSKNTAYLQMNSLRAEDTAVYYCSRWGGDGFYAMDYWGQGTLVTVSSGGGGSGGGGSGGGGSDIQMTQSPSSLSASVGDRVTITCRASQDVNTAVAWYQQKPGKAPKLLIYSASFLYSGVPSRFSGSRSGTDFTLTISSLQPEDFATYYCQQHYTTPPTFGQGTKVEIK

SEQ ID NO: 179 - protein, 874 aa, Artificial Sequence
  Description of Artificial Sequence: Synthetic polypeptide
  MOD_RES (1)..(1): Ala, Arg, Asn, Asp, Gln, Glu, Gly, His, Leu, Lys, Met, Phe, Thr, Val, or not present
  MOD_RES (6)..(6): Phe, Trp, Tyr or Val
  MOD_RES (9)..(9): Lys or Asp
  MOD_RES (62)..(62): Pro, Asn, Asp, His, Glu, Gly, Ser or Thr
  MOD_RES (93)..(93): Ala, Glu, or Lys
  MOD_RES (126)..(126): Gln, Leu, Glu, Phe, His, Ile, Leu, or Tyr
  MOD_RES (187)..(187): Arg, Ile, or Lys
  MOD_RES (242)..(242): Ala, Cys, Phe, Gly, His, Ile, Lys, Leu, Met, Asn, Gln, Arg, Ser, Val, Trp, or Tyr
  MOD_RES (270)..(270): Gln, Ala, His, Phe, Pro, Ser, or Thr
  MOD_RES (301)..(301): Ser, Arg, Ala, Asp, Glu, Phe, Gly, His, Ile, Lys, Leu, Met, Asn, Pro, Gln, Thr, Val, Trp, or Tyr
  MOD_RES (302)..(302): Trp, Lys, Ala, Asp, Glu, Phe, Gly, His, Ile, Lys, Leu, Met, Asn, Pro, Gln, Arg, Ser, Thr, Val, or Tyr
  MOD_RES (332)..(332): Ala, Cys, Ser, or Val
  MOD_RES (363)..(363): Val or Arg
  MOD_RES (365)..(365): Leu, Gln, His, Ile, Lys, or Ser
  MOD_RES (381)..(390): This region may encompass "GGGGS", "GGGGSGGGGS" or "EPKSS"
  See specification as filed for detailed description of substitutions and preferred embodiments
XASLPXLQXESVFQSGAHAYRIPALLYLPGQQSLLAFAEQRASKKDEHAELIVLRRGDYDAXTHQVQWQAQEVVAQARLDGHRSMNPCPLYDXQTGTLFLFFIAIPGQVTEQQQLQTRANVTRLCXVTSTDHGRTWSSPRDLTDAAIGPAYREWSTFAVGPGHCLQLHDRARSLVVPAYAYRKLHPXQRPIPSAFCFLSHDHGRTWARGHFVAQDTLECQVAEVETGEQRVVTLNARSHLRXRVQAQSTNDGLDFQESQLVKKLVEPPPXGCQGSVISFPSPRSGPGSPAQWLLYTHPTHXXQRADLGAYLNPRPPAPEAWSEPVLLAKGSXAYSDLQSMGTGPDGSPLFGCLYEANDYEEIXFXMFTLKQAFPAEYLPQXXXXXXXXXXDKTHTCPPCPAPELLGGPSVFLFPPKPKDTLMISRTPEVTCVVVDVSHEDPEVKFNWYVDGVEVHNAKTKPREEQYNSTYRVVSVLTVLHQDWLNGKEYKCKVSNKALPAPIEKTISKAKGQPREPQVYTLPPSREEMTKNQVSLTCLVKGFYPSDIAVEWESNGQPENNYKTTPPVLDSDGSFFLYSKLTVDKSRWQQGNVFSCSVMHEALHNHYTQKSLSLSPGKGGGGSGGGGSGGGGSEVQLVESGGGLVQPGGSLRLSCAASGFNIKDTYIHWVRQAPGKGLEWVARIYPTNGYTRYADSVKGRFTISADTSKNTAYLQMNSLRAEDTAVYYCSRWGGDGFYAMDYWGQGTLVTVSSGGGGSGGGGSGGGGSDIQMTQSPSSLSASVGDRVTITCRASQDVNTAVAWYQQKPGKAPKLLIYSASFLYSGVPSRFSGSRSGTDFTLTISSLQPEDFATYYCQQHYTTPPTFGQGTKVEIK

SEQ ID NO: 180 - protein, 874 aa, Artificial Sequence
  Description of Artificial Sequence: Synthetic polypeptide
  MOD_RES (1)..(1): Ala, Arg, Asn, Asp, Gln, Glu, Gly, His, Leu, Lys, Met, Phe, Thr, Val, or not present
  MOD_RES (2)..(2): Ala or Lys
  MOD_RES (4)..(4): Asn or Leu
  MOD_RES (5)..(5): Pro or His
  MOD_RES (6)..(6): Phe, Trp, Tyr or Val
  MOD_RES (9)..(9): Lys or Asp
  MOD_RES (44)..(44): Lys, Arg, or Glu
  MOD_RES (45)..(45): Lys, Ala, Arg, or Glu
  MOD_RES (54)..(54): Leu or Met
  MOD_RES (62)..(62): Pro, Asn, Asp, His, Glu, Gly, Ser or Thr
  MOD_RES (69)..(69): Gln or His
  MOD_RES (78)..(78): Arg or Lys
  MOD_RES (80)..(80): Asp or Pro
  MOD_RES (93)..(93): Ala, Glu or Lys
  MOD_RES (107)..(107): Gly or Asp
  MOD_RES (108)..(108): Gln or His
  MOD_RES (112)..(112): Gln, Arg, or Lys
  MOD_RES (125)..(125): Ala, Cys, Ile, Ser, Val, or Leu
  MOD_RES (126)..(126): Gln, Leu, Glu, Phe, His, Ile, Leu, or Tyr
  MOD_RES (150)..(150): Ala or Val
  MOD_RES (164)..(164): Cys or Gly
  MOD_RES (170)..(170): Arg or Pro
  MOD_RES (171)..(171): Ala or Gly
  MOD_RES (187)..(187): Arg, Ile, or Lys
  MOD_RES (188)..(188): Gln or Pro
  MOD_RES (189)..(189): Arg or Pro
  MOD_RES (196)..(196): Ala, Cys, Leu, or Val
  MOD_RES (213)..(213): Ala, Cys, Asn, Ser, or Thr
  MOD_RES (217)..(217): Leu, Ala, or Val
  MOD_RES (225)..(225): Glu or Pro
  MOD_RES (239)..(239): His or Pro
  MOD_RES (240)..(240): Leu, Asp, Asn, or Tyr
  MOD_RES (241)..(241): Arg, Ala, Asp, Leu, Gln, or Tyr
  MOD_RES (242)..(242): Ala, Cys, Phe, Gly, His, Ile, Lys, Leu, Met, Asn, Gln, Arg, Ser, Val, Trp, or Tyr
  MOD_RES (244)..(244): Val, Ile, or Lys
  MOD_RES (249)..(249): Thr or Ala
  MOD_RES (251)..(251): Asp or Gly
  MOD_RES (257)..(257): Glu, Lys, or Pro
  MOD_RES (258)..(258): Ser or Cys
  MOD_RES (260)..(260): Leu, Asp, Phe, Gln, or Thr
  MOD_RES (265)..(265): Val or Phe
  MOD_RES (270)..(270): Gln, Ala, His, Phe, Pro, Ser, or Thr
  MOD_RES (272)..(272): Cys or Val
  MOD_RES (292)..(292): Trp or Arg
  MOD_RES (301)..(301): Ser, Arg, Ala, Asp, Glu, Phe, Gly, His, Ile, Lys, Leu, Met, Asn, Pro, Gln, Thr, Val, Trp, or Tyr
  MOD_RES (302)..(302): Trp, Lys, Ala, Asp, Glu, Phe, Gly, His, Ile, Lys, Leu, Met, Asn, Pro, Gln, Arg, Ser, Thr, Val, or Tyr
  MOD_RES (325)..(325): Lys or Val
  MOD_RES (332)..(332): Ala, Cys, Ser, or Val
  MOD_RES (352)..(352): Cys, Leu, or Val
  MOD_RES (363)..(363): Val or Arg
  MOD_RES (365)..(365): Leu, Gln, His, Ile, Lys, or Ser
  MOD_RES (381)..(390): This region may encompass "GGGGS", "GGGGSGGGGS" or "EPKSS"
  See specification as filed for detailed description of substitutions and preferred embodiments
XXSXXXLQXESVFQSGAHAYRIPALLYLPGQQSLLAFAEQRASXXDEHAELIVXRRGDYDAXTHQVQWXAQEVVAQAXLXGHRSMNPCPLYDXQTGTLFLFFIAIPXXVTEXQQLQTRANVTRLXXVTSTDHGRTWSSPRDLTDAAIGPXYREWSTFAVGPGHXLQLHDXXRSLVVPAYAYRKLHPXXXPIPSAFXFLSHDHGRTWARGHFVXQDTXECQVAEVXTGEQRVVTLNARSXXXXRXQAQSXNXGLDFQXXQXVKKLXEPPPXGXQGSVISFPSPRSGPGSPAQXLLYTHPTHXXQRADLGAYLNPRPPAPEAWSEPXLLAKGSXAYSDLQSMGTGPDGSPLFGXLYEANDYEEIXFXMFTLKQAFPAEYLPQXXXXXXXXXXDKTHTCPPCPAPELLGGPSVFLFPPKPKDTLMISRTPEVTCVVVDVSHEDPEVKFNWYVDGVEVHNAKTKPREEQYNSTYRVVSVLTVLHQDWLNGKEYKCKVSNKALPAPIEKTISKAKGQPREPQVYTLPPSREEMTKNQVSLTCLVKGFYPSDIAVEWESNGQPENNYKTTPPVLDSDGSFFLYSKLTVDKSRWQQGNVFSCSVMHEALHNHYTQKSLSLSPGKGGGGSGGGGSGGGGSEVQLVESGGGLVQPGGSLRLSCAASGFNIKDTYIHWVRQAPGKGLEWVARIYPTNGYTRYADSVKGRFTISADTSKNTAYLQMNSLRAEDTAVYYCSRWGGDGFYAMDYWGQGTLVTVSSGGGGSGGGGSGGGGSDIQMTQSPSSLSASVGDRVTITCRASQDVNTAVAWYQQKPGKAPKLLIYSASFLYSGVPSRFSGSRSGTDFTLTISSLQPEDFATYYCQQHYTTPPTFGQGTKVEIK

SEQ ID NO: 181 - DNA, 1140 bp, Artificial Sequence
  Description of Artificial Sequence: Synthetic polynucleotide
gatgcatctctgccttacctgcagaaagaaagcgtgttccagtctggcgcccacgcctacagaattcccgctctgctgtatctgccaggccagcagtctctgctggctttcgctgaacagcgggccagcaagaaggatgagcacgccgaactgatcgtgctgcggagaggcgattacgacgccggcacacatcaggtgcagtggcaggctcaagaggtggtggctcaggctagactggacggccacagatctatgaacccctgtcctctgtacgatgaacagaccggcacactgtttctgttctttatcgctatccccggccaagtgaccgagcagcagcagctgcagacaagagccaacgtgaccagactgtgttacgtgacctccaccgaccacggcagaacctggtctagccctagagatctgaccgacgccgccatcggacctgcctatagagagtggtccaccttcgccgttggacctggacactgtctccagctgcacgacagggctagatctctggtggtgcctgcctacgcctatagaaagctgcaccccaaacagcggcctattcctagcgccttctgctttctgagccacgatcacggcaggacatgggccagaggacatttcgtggcccaggacacactggaatgccaggtggccgaagtggaaaccggcgagcagagagtcgtgaccctgaacgccagatctcacctgagattcagagtgcaggcccagagcacaaacgacggcctggatttccaagagagccagctggtcaagaaactggtggaacctcctccaaccggctgtcagggaagcgtgatcagctttccatctcctagaagcggccctggctctcctgctcagtggctgctgtatacacaccccacacacagctggcagagagccgatctgggcgcctacctgaatcctagacctcctgctcctgaggcttggagcgaacctgttctgctggccaagggcagcgctgcctacagcgatctgcagtctatgggcacaggccctgatggcagccctctgtttggctgtctgtacgaggccaacgactacgaagagatcgtgttcctgatgttcaccctgaagcaggcctttccagccgagtacctgcctcaa

SEQ ID NO: 182 - protein, 380 aa, Artificial Sequence
  Description of Artificial Sequence: Synthetic polypeptide
  MOD_RES (1)..(1): Ala, Arg, Asn, Asp, Gln, Glu, Gly, His, Leu, Lys, Met, Phe, Thr, Val, or not present
  MOD_RES (2)..(2): Ala or Lys
  MOD_RES (4)..(4): Asn or Leu
  MOD_RES (5)..(5): Pro or His
  MOD_RES (6)..(6): Phe, Trp, Tyr or Val
  MOD_RES (9)..(9): Lys or Asp
  MOD_RES (44)..(44): Lys, Arg, or Glu
  MOD_RES (45)..(45): Lys, Ala, Arg, or Glu
  MOD_RES (54)..(54): Leu or Met
  MOD_RES (62)..(62): Pro, Asn, Asp, His, Glu, Gly, Ser or Thr
  MOD_RES (69)..(69): Gln or His
  MOD_RES (78)..(78): Arg or Lys
  MOD_RES (80)..(80): Asp or Pro
  MOD_RES (93)..(93): Ala, Glu or Lys
  MOD_RES (107)..(107): Gly or Asp
  MOD_RES (108)..(108): Gln or His
  MOD_RES (112)..(112): Gln, Arg, or Lys
  MOD_RES (125)..(125): Ala, Cys, Ile, Ser, Val, or Leu
  MOD_RES (126)..(126): Gln, Leu, Glu, Phe, His, Ile, Leu, or Tyr
  MOD_RES (150)..(150): Ala or Val
  MOD_RES (164)..(164): Cys or Gly
  MOD_RES (170)..(170): Arg or Pro
  MOD_RES (171)..(171): Ala or Gly
  MOD_RES (187)..(187): Arg, Ile, or Lys
  MOD_RES (188)..(188): Gln or Pro
  MOD_RES (189)..(189): Arg or Pro
  MOD_RES (196)..(196): Ala, Cys, Leu, or Val
  MOD_RES (213)..(213): Ala, Cys, Asn, Ser, or Thr
  MOD_RES (217)..(217): Leu, Ala, or Val
  MOD_RES (225)..(225): Glu or Pro
  MOD_RES (239)..(239): His or Pro
  MOD_RES (240)..(240): Leu, Asp, Asn, or Tyr
  MOD_RES (241)..(241): Arg, Ala, Asp, Leu, Gln, or Tyr
  MOD_RES (242)..(242): Ala, Cys, Phe, Gly, His, Ile, Lys, Leu, Met, Asn, Gln, Arg, Ser, Val, Trp, or Tyr
  MOD_RES (244)..(244): Val, Ile, or Lys
  MOD_RES (249)..(249): Thr or Ala
  MOD_RES (251)..(251): Asp or Gly
  MOD_RES (257)..(257): Glu, Lys, or Pro
  MOD_RES (258)..(258): Ser or Cys
  MOD_RES (260)..(260): Leu, Asp, Phe, Gln, or Thr
  MOD_RES (265)..(265): Val or Phe
  MOD_RES (270)..(270): Gln, Ala, His, Phe, Pro, Ser, or Thr
  MOD_RES (272)..(272): Cys or Val
  MOD_RES (292)..(292): Trp or Arg
  MOD_RES (301)..(301): Ser, Arg, Ala, Asp, Glu, Phe, Gly, His, Ile, Lys, Leu, Met, Asn, Pro, Gln, Thr, Val, Trp, or Tyr
  MOD_RES (302)..(302): Trp, Lys, Ala, Asp, Glu, Phe, Gly, His, Ile, Lys, Leu, Met, Asn, Pro, Gln, Arg, Ser, Thr, Val, or Tyr
  MOD_RES (325)..(325): Lys or Val
  MOD_RES (332)..(332): Ala, Cys, Ser, or Val
  MOD_RES (352)..(352): Cys, Leu, or Val
  MOD_RES (363)..(363): Val or Arg
  MOD_RES (365)..(365): Leu, Gln, His, Ile, Lys, or Ser
  See specification as filed for detailed description of substitutions and preferred embodiments
XXSXXXLQXESVFQSGAHAYRIPALLYLPGQQSLLAFAEQRASXXDEHAELIVXRRGDYDAXTHQVQWXAQEVVAQAXLXGHRSMNPCPLYDXQTGTLFLFFIAIPXXVTEXQQLQTRANVTRLXXVTSTDHGRTWSSPRDLTDAAIGPXYREWSTFAVGPGHXLQLHDXXRSLVVPAYAYRKLHPXXXPIPSAFXFLSHDHGRTWARGHFVXQDTXECQVAEVXTGEQRVVTLNARSXXXXRXQAQSXNXGLDFQXXQXVKKLXEPPPXGXQGSVISFPSPRSGPGSPAQXLLYTHPTHXXQRADLGAYLNPRPPAPEAWSEPXLLAKGSXAYSDLQSMGTGPDGSPLFGXLYEANDYEEIXFXMFTLKQAFPAEYLPQ

SEQ ID NO: 183 - protein, 380 aa, Artificial Sequence
  Description of Artificial Sequence: Synthetic polypeptide
  MOD_RES (1)..(1): Ala, Arg, Asn, Asp, Gln, Glu, Gly, His, Leu, Lys, Met, Phe, Thr, Val, or not present
  MOD_RES (6)..(6): Phe, Trp, Tyr or Val
  MOD_RES (9)..(9): Lys or Asp
  MOD_RES (62)..(62): Pro, Asn, Asp, His, Glu, Gly, Ser or Thr
  MOD_RES (93)..(93): Ala, Glu, or Lys
  MOD_RES (126)..(126): Gln, Leu, Glu, Phe, His, Ile, Leu, or Tyr
  MOD_RES (187)..(187): Arg, Ile, or Lys
  MOD_RES (242)..(242): Ala, Cys, Phe, Gly, His, Ile, Lys, Leu, Met, Asn, Gln, Arg, Ser, Val, Trp, or Tyr
  MOD_RES (270)..(270): Gln, Ala, His, Phe, Pro, Ser, or Thr
  MOD_RES (301)..(301): Ser, Arg, Ala, Asp, Glu, Phe, Gly, His, Ile, Lys, Leu, Met, Asn, Pro, Gln, Thr, Val, Trp, or Tyr
  MOD_RES (302)..(302): Trp, Lys, Ala, Asp, Glu, Phe, Gly, His, Ile, Lys, Leu, Met, Asn, Pro, Gln, Arg, Ser, Thr, Val, or Tyr
  MOD_RES (332)..(332): Ala, Cys, Ser, or Val
  MOD_RES (363)..(363): Val or Arg
  MOD_RES (365)..(365): Leu, Gln, His, Ile, Lys, or Ser
  See specification as filed for detailed description of substitutions and preferred embodiments
XASLPXLQXESVFQSGAHAYRIPALLYLPGQQSLLAFAEQRASKKDEHAELIVLRRGDYDAXTHQVQWQAQEVVAQARLDGHRSMNPCPLYDXQTGTLFLFFIAIPGQVTEQQQLQTRANVTRLCXVTSTDHGRTWSSPRDLTDAAIGPAYREWSTFAVGPGHCLQLHDRARSLVVPAYAYRKLHPXQRPIPSAFCFLSHDHGRTWARGHFVAQDTLECQVAEVETGEQRVVTLNARSHLRXRVQAQSTNDGLDFQESQLVKKLVEPPPXGCQGSVISFPSPRSGPGSPAQWLLYTHPTHXXQRADLGAYLNPRPPAPEAWSEPVLLAKGSXAYSDLQSMGTGPDGSPLFGCLYEANDYEEIXFXMFTLKQAFPAEYLPQ

SEQ ID NO: 184 - protein, 5 aa, Artificial Sequence
  Description of Artificial Sequence: Synthetic peptide
GGGGS

SEQ ID NO: 185 - protein, 612 aa, Artificial Sequence
  Description of Artificial Sequence: Synthetic polypeptide
DASLPYLQKESVFQSGAHAYRIPALLYLPGQQSLLAFAEQRASKKDEHAELIVLRRGDYDAGTHQVQWQAQEVVAQARLDGHRSMNPCPLYDEQTGTLFLFFIAIPGQVTEQQQLQTRANVTRLCYVTSTDHGRTWSSPRDLTDAAIGPAYREWSTFAVGPGHCLQLHDRARSLVVPAYAYRKLHPKQRPIPSAFCFLSHDHGRTWARGHFVAQDTLECQVAEVETGEQRVVTLNARSHLRARVQAQSTNDGLDFQESQLVKKLVEPPPTGCQGSVISFPSPRSGPGSPAQWLLYTHPTHSWQRADLGAYLNPRPPAPEAWSEPVLLAKGSAAYSDLQSMGTGPDGSPLFGCLYEANDYEEIVFLMFTLKQAFPAEYLPQEPKSSDKTHTCPPCPAPELLGGPSVFLFPPKPKDTLMISRTPEVTCVVVDVSHEDPEVKFNWYVDGVEVHNAKTKPREEQYNSTYRVVSVLTVLHQDWLNGKEYKCKVSNKALPAPIEKTISKAKGQPREPQVYTLPPSREEMTKNQVSLYCLVKGFYPSDIAVEWESNGQPENNYKTTPPVLDSDGSFFLYSKLTVDKSRWQQGNVFSCSVMHEALHNHYTQKSLSLSPGK

SEQ ID NO: 186 - DNA, 1836 bp, Artificial Sequence
  Description of Artificial Sequence: Synthetic polynucleotide
gatgcatctctgccttacctgcagaaagaaagcgtgttccagtctggcgcccacgcctacagaattcccgctctgctgtatctgccaggccagcagtctctgctggctttcgctgaacagcgggccagcaagaaggatgagcacgccgaactgatcgtgctgcggagaggcgattacgacgccggcacacatcaggtgcagtggcaggctcaagaggtggtggctcaggctagactggacggccacagatctatgaacccctgtcctctgtacgatgaacagaccggcacactgtttctgttctttatcgctatccccggccaagtgaccgagcagcagcagctgcagacaagagccaacgtgaccagactgtgttacgtgacctccaccgaccacggcagaacctggtctagccctagagatctgaccgacgccgccatcggacctgcctatagagagtggtccaccttcgccgttggacctggacactgtctccagctgcacgacagggctagatctctggtggtgcctgcctacgcctatagaaagctgcaccccaaacagcggcctattcctagcgccttctgctttctgagccacgatcacggcaggacatgggccagaggacatttcgtggcccaggacacactggaatgccaggtggccgaagtggaaaccggcgagcagagagtcgtgaccctgaacgccagatctcacctgagagccagagtgcaggcccagagcacaaacgacggcctggatttccaagagagccagctggtcaagaaactggtggaacctcctccaaccggctgtcagggaagcgtgatcagctttccatctcctagaagcggccctggctctcctgctcagtggctgctgtatacacaccccacacacagctggcagagagccgatctgggcgcctacctgaatcctagacctcctgctcctgaggcttggagcgaacctgttctgctggccaagggcagcgctgcctacagcgatctgcagtctatgggcacaggccctgatggcagccctctgtttggctgtctgtacgaggccaacgactacgaagagatcgtgttcctgatgttcaccctgaagcaggcctttccagccgagtacctgcctcaagagcccaaatcttctgacaaaactcacacatgcccaccgtgcccagcacctgaactcctggggggaccgtcagtcttcctcttccccccaaaacccaaggacaccctcatgatctcccggacccctgaggtcacatgcgtggtggtggacgtgagccacgaagaccctgaggtcaagttcaactggtacgtggacggcgtggaggtgcataatgccaagacaaagccgcgggaggagcagtacaacagcacgtaccgtgtggtcagcgtcctcaccgtcctgcaccaggactggctgaatggcaaggagtacaagtgcaaggtctccaacaaagccctcccagcccccatcgagaaaaccatctccaaagccaaagggcagccccgagaaccacaggtctacaccctgcccccatcccgggaggagatgaccaagaaccaggtcagcctgtactgcctggtcaaaggcttctatcccagcgacatcgccgtggagtgggagagcaatgggcagccggagaacaactacaagaccacgcctcccgtgctggactccgacggctccttcttcctctatagcaagctcaccgtggacaagagcaggtggcagcaggggaacgtcttctcatgctccgtgatgcatgaggctctgcacaaccactacacgcagaagagcctctccctgtctccgggtaaa

SEQ ID NO: 187 - protein, 612 aa, Artificial Sequence
  Description of Artificial Sequence: Synthetic polypeptide
DASLPYLQKESVFQSGAHAYRIPALLYLPGQQSLLAFAEQRASKKDEHAELIVLRRGDYDAGTHQVQWQAQEVVAQARLDGHRSMNPCPLYDEQTGTLFLFFIAIPGQVTEQQQLQTRANVTRLCYVTSTDHGRTWSSPRDLTDAAIGPAYREWSTFAVGPGHCLQLHDRARSLVVPAYAYRKLHPKQRPIPSAFCFLSHDHGRTWARGHFVAQDTLECQVAEVETGEQRVVTLNARSHLRFRVQAQSTNDGLDFQESQLVKKLVEPPPTGCQGSVISFPSPRSGPGSPAQWLLYTHPTHSWQRADLGAYLNPRPPAPEAWSEPVLLAKGSAAYSDLQSMGTGPDGSPLFGCLYEANDYEEIVFLMFTLKQAFPAEYLPQEPKSSDKTHTCPPCPAPELLGGPSVFLFPPKPKDTLMISRTPEVTCVVVDVSHEDPEVKFNWYVDGVEVHNAKTKPREEQYNSTYRVVSVLTVLHQDWLNGKEYKCKVSNKALPAPIEKTISKAKGQPREPQVYTLPPSREEMTKNQVSLYCLVKGFYPSDIAVEWESNGQPENNYKTTPPVLDSDGSFFLYSKLTVDKSRWQQGNVFSCSVMHEALHNHYTQKSLSLSPGK

SEQ ID NO: 188 - DNA, 1836 bp, Artificial Sequence
  Description of Artificial Sequence: Synthetic polynucleotide
gatgcatctctgccttacctgcagaaagaaagcgtgttccagtctggcgcccacgcctacagaattcccgctctgctgtatctgccaggccagcagtctctgctggctttcgctgaacagcgggccagcaagaaggatgagcacgccgaactgatcgtgctgcggagaggcgattacgacgccggcacacatcaggtgcagtggcaggctcaagaggtggtggctcaggctagactggacggccacagatctatgaacccctgtcctctgtacgatgaacagaccggcacactgtttctgttctttatcgctatccccggccaagtgaccgagcagcagcagctgcagacaagagccaacgtgaccagactgtgttacgtgacctccaccgaccacggcagaacctggtctagccctagagatctgaccgacgccgccatcggacctgcctatagagagtggtccaccttcgccgttggacctggacactgtctccagctgcacgacagggctagatctctggtggtgcctgcctacgcctatagaaagctgcaccccaaacagcggcctattcctagcgccttctgctttctgagccacgatcacggcaggacatgggccagaggacatttcgtggcccaggacacactggaatgccaggtggccgaagtggaaaccggcgagcagagagtcgtgaccctgaacgccagatctcacctgagattcagagtgcaggcccagagcacaaacgacggcctggatttccaagagagccagctggtcaagaaactggtggaacctcctccaaccggctgtcagggaagcgtgatcagctttccatctcctagaagcggccctggctctcctgctcagtggctgctgtatacacaccccacacacagctggcagagagccgatctgggcgcctacctgaatcctagacctcctgctcctgaggcttggagcgaacctgttctgctggccaagggcagcgctgcctacagcgatctgcagtctatgggcacaggccctgatggcagccctctgtttggctgtctgtacgaggccaacgactacgaagagatcgtgttcctgatgttcaccctgaagcaggcctttccagccgagtacctgcctcaagagcccaaatcttctgacaaaactcacacatgcccaccgtgcccagcacctgaactcctggggggaccgtcagtcttcctcttccccccaaaacccaaggacaccctcatgatctcccggacccctgaggtcacatgcgtggtggtggacgtgagccacgaagaccctgaggtcaagttcaactggtacgtggacggcgtggaggtgcataatgccaagacaaagccgcgggaggagcagtacaacagcacgtaccgtgtggtcagcgtcctcaccgtcctgcaccaggactggctgaatggcaaggagtacaagtgcaaggtctccaacaaagccctcccagcccccatcgagaaaaccatctccaaagccaaagggcagccccgagaaccacaggtctacaccctgcccccatcccgggaggagatgaccaagaaccaggtcagcctgtactgcctggtcaaaggcttctatcccagcgacatcgccgtggagtgggagagcaatgggcagccggagaacaactacaagaccacgcctcccgtgctggactccgacggctccttcttcctctatagcaagctcaccgtggacaagagcaggtggcagcaggggaacgtcttctcatgctccgtgatgcatgaggctctgcacaaccactacacgcagaagagcctctccctgtctccgggtaaa

SEQ ID NO: 189 - protein, 450 aa, Artificial Sequence
  Description of Artificial Sequence: Synthetic polypeptide
EVQLVESGGGLVQPGGSLRLSCAASGFNIKDTYIHWVRQAPGKGLEWVARIYPTNGYTRYADSVKGRFTISADTSKNTAYLQMNSLRAEDTAVYYCSRWGGDGFYAMDYWGQGTLVTVSSASTKGPSVFPLAPSSKSTSGGTAALGCLVKDYFPEPVTVSWNSGALTSGVHTFPAVLQSSGLYSLSSVVTVPSSSLGTQTYICNVNHKPSNTKVDKKVEPKSCDKTHTCPPCPAPELLGGPSVFLFPPKPKDTLMISRTPEVTCVVVDVSHEDPEVKFNWYVDGVEVHNAKTKPREEQYNSTYRVVSVLTVLHQDWLNGKEYKCKVSNKALPAPIEKTISKAKGQPREPQVYTLPPSREEMTKNQVSLTCLVKGFYPSDIAVEWESNGQPENNYKTTPPVLDSDGSFFLTSKLTVDKSRWQQGNVFSCSVMHEALHNHYTQKSLSLSPGK

SEQ ID NO: 190 - DNA, 1350 bp, Artificial Sequence
  Description of Artificial Sequence: Synthetic polynucleotide
gaggtgcagctggttgaatctggcggaggactggttcagcctggcggatctctgagactgtcttgtgccgccagcggcttcaacatcaaggacacctacatccactgggtccgacaggcccctggcaaaggacttgaatgggtcgccagaatctaccccaccaacggctacaccagatacgccgactctgtgaagggcagattcaccatcagcgccgacaccagcaagaacaccgcctacctgcagatgaacagcctgagagccgaggacaccgccgtgtactactgttctagatggggaggcgacggcttctacgccatggattattggggccagggcaccctggtcaccgtttcttctgctagcaccaagggcccatccgtcttccccctggcaccctcctccaagagcacctctgggggcacagcggccctgggctgcctggtcaaggactacttccccgaaccggtgacggtgtcctggaactcaggcgctctgaccagcggcgtgcacaccttcccggctgtcctacagtcctcaggactctactccctcagcagcgtggtgaccgtgccctccagcagcttgggcacccagacctacatctgcaacgtgaatcacaagcccagcaacaccaaggtggacaagaaagttgagcccaaatcttgtgacaaaactcacacatgcccaccgtgcccagcacctgaactcctggggggaccgtcagtcttcctcttccccccaaaacccaaggacaccctcatgatctcccggacccctgaggtcacatgcgtggtggtggacgtgagccacgaagaccctgaggtcaagttcaactggtacgtggacggcgtggaggtgcataatgccaagacaaagccgcgggaggagcagtacaacagcacgtaccgtgtggtcagcgtcctcaccgtcctgcaccaggactggctgaatggcaaggagtacaagtgcaaggtctccaacaaagccctcccagcccccatcgagaaaaccatctccaaagccaaagggcagccccgagaaccacaggtctacaccctgcccccatcccgggaggagatgaccaagaaccaggtcagcctgacctgcctggtcaaaggcttctatcccagcgacatcgccgtggagtgggagagcaatgggcagccggagaacaactacaagaccacgcctcccgtgctggactccgacggctccttcttcctcactagcaagctcaccgtggacaagagcaggtggcagcaggggaacgtcttctcatgctccgtgatgcatgaggctctgcacaaccactacacgcagaagagcctctccctgtctccgggtaaa

SEQ ID NO: 191 - protein, 380 aa, Artificial Sequence
  Description of Artificial Sequence: Synthetic polypeptide
DASLPYLQKESVFQSGAHAYRIPALLYLPGQQSLLAFAEQRASKKDEHAELIVLRRGDYDAGTHQVQWQAQEVVAQARLDGHRSMNPCPLYDEQTGTLFLFFIAIPGQVTEQQQLQTRANVTRLCYVTSTDHGRTWSSPRDLTDAAIGPAYREWSTFAVGPGHCLQLHDRARSLVVPAYAYRKLHPKQRPIPSAFCFLSHDHGRTWARGHFVAQDTLECQVAEVETGEQRVVTLNARSHLRARVQAQSTNDGLDFQESQLVKKLVEPPPQGCQGSVISFPSPRSGPGSPAQWLLYTHPTHSWQRADLGAYLNPRPPAPEAWSEPVLLAKGSAAYSDLQSMGTGPDGSPLFGCLYEANDYEEIVFLMFTLKQAFPAEYLPQ

SEQ ID NO: 192 - protein, 612 aa, Artificial Sequence
  Description of Artificial Sequence: Synthetic polypeptide
DASLPYLQKESVFQSGAHAYRIPALLYLPGQQSLLAFAEQRASKKDEHAELIVLRRGDYDAGTHQVQWQAQEVVAQARLDGHRSMNPCPLYDEQTGTLFLFFIAIPGQVTEQQQLQTRANVTRLCYVTSTDHGRTWSSPRDLTDAAIGPAYREWSTFAVGPGHCLQLHDRARSLVVPAYAYRKLHPKQRPIPSAFCFLSHDHGRTWARGHFVAQDTLECQVAEVETGEQRVVTLNARSHLRARVQAQSTNDGLDFQESQLVKKLVEPPPQGCQGSVISFPSPRSGPGSPAQWLLYTHPTHSWQRADLGAYLNPRPPAPEAWSEPVLLAKGSAAYSDLQSMGTGPDGSPLFGCLYEANDYEEIVFLMFTLKQAFPAEYLPQEPKSSDKTHTCPPCPAPELLGGPSVFLFPPKPKDTLMISRTPEVTCVVVDVSHEDPEVKFNWYVDGVEVHNAKTKPREEQYNSTYRVVSVLTVLHQDWLNGKEYKCKVSNKALPAPIEKTISKAKGQPREPQVYTLPPSREEMTKNQVSLTCLVKGFYPSDIAVEWESNGQPENNYKTTPPVLDSDGSFFLTSKLTVDKSRWQQGNVFSCSVMHEALHNHYTQKSLSLSPGK

SEQ ID NO: 193 - protein, 612 aa, Artificial Sequence
  Description of Artificial Sequence: Synthetic polypeptide
DASLPYLQKESVFQSGAHAYRIPALLYLPGQQSLLAFAEQRASKKDEHAELIVLRRGDYDAGTHQVQWQAQEVVAQARLDGHRSMNPCPLYDEQTGTLFLFFIAIPGQVTEQQQLQTRANVTRLCYVTSTDHGRTWSSPRDLTDAAIGPAYREWSTFAVGPGHCLQLHDRARSLVVPAYAYRKLHPKQRPIPSAFCFLSHDHGRTWARGHFVAQDTLECQVAEVETGEQRVVTLNARSHLRARVQAQSTNDGLDFQESQLVKKLVEPPPQGCQGSVISFPSPRSGPGSPAQWLLYTHPTHSWQRADLGAYLNPRPPAPEAWSEPVLLAKGSAAYSDLQSMGTGPDGSPLFGCLYEANDYEEIVFLMFTLKQAFPAEYLPQEPKSSDKTHTCPPCPAPELLGGPSVFLFPPKPKDTLMISRTPEVTCVVVDVSHEDPEVKFNWYVDGVEVHNAKTKPREEQYNSTYRVVSVLTVLHQDWLNGKEYKCKVSNKALPAPIEKTISKAKGQPREPQVYTLPPSREEMTKNQVSLTCLVKGFYPSDIAVEWESNGQPENNYKTTPPVLDSDGSFFLYSKLTVDKSRWQQGNVFSCSVMHEALHNHYTQKSLSLSPGK

SEQ ID NO: 194 - protein, 869 aa, Artificial Sequence
  Description of Artificial Sequence: Synthetic polypeptide
DASLPYLQKESVFQSGAHAYRIPALLYLPGQQSLLAFAEQRASKKDEHAELIVLRRGDYDAGTHQVQWQAQEVVAQARLDGHRSMNPCPLYDEQTGTLFLFFIAIPGQVTEQQQLQTRANVTRLCYVTSTDHGRTWSSPRDLTDAAIGPAYREWSTFAVGPGHCLQLHDRARSLVVPAYAYRKLHPKQRPIPSAFCFLSHDHGRTWARGHFVAQDTLECQVAEVETGEQRVVTLNARSHLRARVQAQSTNDGLDFQESQLVKKLVEPPPQGCQGSVISFPSPRSGPGSPAQWLLYTHPTHSWQRADLGAYLNPRPPAPEAWSEPVLLAKGSAAYSDLQSMGTGPDGSPLFGCLYEANDYEEIVFLMFTLKQAFPAEYLPQEPKSSDKTHTCPPCPAPELLGGPSVFLFPPKPKDTLMISRTPEVTCVVVDVSHEDPEVKFNWYVDGVEVHNAKTKPREEQYNSTYRVVSVLTVLHQDWLNGKEYKCKVSNKALPAPIEKTISKAKGQPREPQVYTLPPSREEMTKNQVSLTCLVKGFYPSDIAVEWESNGQPENNYKTTPPVLDSDGSFFLYSKLTVDKSRWQQGNVFSCSVMHEALHNHYTQKSLSLSPGKGGGGSGGGGSGGGGSEVQLVESGGGLVQPGGSLRLSCAASGFNIKDTYIHWVRQAPGKGLEWVARIYPTNGYTRYADSVKGRFTISADTSKNTAYLQMNSLRAEDTAVYYCSRWGGDGFYAMDYWGQGTLVTVSSGGGGSGGGGSGGGGSDIQMTQSPSSLSASVGDRVTITCRASQDVNTAVAWYQQKPGKAPKLLIYSASFLYSGVPSRFSGSRSGTDFTLTISSLQPEDFATYYCQQHYTTPPTFGQGTKVEIK

SEQ ID NO: 195 - protein, 617 aa, Artificial Sequence
  Description of Artificial Sequence: Synthetic polypeptide
DASLPYLQKESVFQSGAHAYRIPALLYLPGQQSLLAFAEQRASKKDEHAELIVLRRGDYDAGTHQVQWQAQEVVAQARLDGHRSMNPCPLYDEQTGTLFLFFIAIPGQVTEQQQLQTRANVTRLCYVTSTDHGRTWSSPRDLTDAAIGPAYREWSTFAVGPGHCLQLHDRARSLVVPAYAYRKLHPKQRPIPSAFCFLSHDHGRTWARGHFVAQDTLECQVAEVETGEQRVVTLNARSHLRARVQAQSTNDGLDFQESQLVKKLVEPPPQGCQGSVISFPSPRSGPGSPAQWLLYTHPTHSWQRADLGAYLNPRPPAPEAWSEPVLLAKGSAAYSDLQSMGTGPDGSPLFGCLYEANDYEEIVFLMFTLKQAFPAEYLPQGGGGSGGGGSDKTHTCPPCPAPELLGGPSVFLFPPKPKDTLMISRTPEVTCVVVDVSHEDPEVKFNWYVDGVEVHNAKTKPREEQYNSTYRVVSVLTVLHQDWLNGKEYKCKVSNKALPAPIEKTISKAKGQPREPQVYTLPPSREEMTKNQVSLTCLVKGFYPSDIAVEWESNGQPENNYKTTPPVLDSDGSFFLTSKLTVDKSRWQQGNVFSCSVMHEALHNHYTQKSLSLSPGK

SEQ ID NO: 196 - protein, 617 aa, Artificial Sequence
  Description of Artificial Sequence: Synthetic polypeptide
DASLPYLQKESVFQSGAHAYRIPALLYLPGQQSLLAFAEQRASKKDEHAELIVLRRGDYDAGTHQVQWQAQEVVAQARLDGHRSMNPCPLYDEQTGTLFLFFIAIPGQVTEQQQLQTRANVTRLCYVTSTDHGRTWSSPRDLTDAAIGPAYREWSTFAVGPGHCLQLHDRARSLVVPAYAYRKLHPKQRPIPSAFCFLSHDHGRTWARGHFVAQDTLECQVAEVETGEQRVVTLNARSHLRARVQAQSTNDGLDFQESQLVKKLVEPPPQGCQGSVISFPSPRSGPGSPAQWLLYTHPTHSWQRADLGAYLNPRPPAPEAWSEPVLLAKGSAAYSDLQSMGTGPDGSPLFGCLYEANDYEEIVFLMFTLKQAFPAEYLPQGGGGSGGGGSDKTHTCPPCPAPELLGGPSVFLFPPKPKDTLMISRTPEVTCVVVDVSHEDPEVKFNWYVDGVEVHNAKTKPREEQYNSTYRVVSVLTVLHQDWLNGKEYKCKVSNKALPAPIEKTISKAKGQPREPQVYTLPPSREEMTKNQVSLTCLVKGFYPSDIAVEWESNGQPENNYKTTPPVLDSDGSFFLYSKLTVDKSRWQQGNVFSCSVMHEALHNHYTQKSLSLSPGK

SEQ ID NO: 197 - protein, 874 aa, Artificial Sequence
  Description of Artificial Sequence: Synthetic polypeptide
DASLPYLQKESVFQSGAHAYRIPALLYLPGQQSLLAFAEQRASKKDEHAELIVLRRGDYDAGTHQVQWQAQEVVAQARLDGHRSMNPCPLYDEQTGTLFLFFIAIPGQVTEQQQLQTRANVTRLCYVTSTDHGRTWSSPRDLTDAAIGPAYREWSTFAVGPGHCLQLHDRARSLVVPAYAYRKLHPKQRPIPSAFCFLSHDHGRTWARGHFVAQDTLECQVAEVETGEQRVVTLNARSHLRARVQAQSTNDGLDFQESQLVKKLVEPPPQGCQGSVISFPSPRSGPGSPAQWLLYTHPTHSWQRADLGAYLNPRPPAPEAWSEPVLLAKGSAAYSDLQSMGTGPDGSPLFGCLYEANDYEEIVFLMFTLKQAFPAEYLPQGGGGSGGGGSDKTHTCPPCPAPELLGGPSVFLFPPKPKDTLMISRTPEVTCVVVDVSHEDPEVKFNWYVDGVEVHNAKTKPREEQYNSTYRVVSVLTVLHQDWLNGKEYKCKVSNKALPAPIEKTISKAKGQPREPQVYTLPPSREEMTKNQVSLTCLVKGFYPSDIAVEWESNGQPENNYKTTPPVLDSDGSFFLYSKLTVDKSRWQQGNVFSCSVMHEALHNHYTQKSLSLSPGKGGGGSGGGGSGGGGSEVQLVESGGGLVQPGGSLRLSCAASGFNIKDTYIHWVRQAPGKGLEWVARIYPTNGYTRYADSVKGRFTISADTSKNTAYLQMNSLRAEDTAVYYCSRWGGDGFYAMDYWGQGTLVTVSSGGGGSGGGGSGGGGSDIQMTQSPSSLSASVGDRVTITCRASQDVNTAVAWYQQKPGKAPKLLIYSASFLYSGVPSRFSGSRSGTDFTLTISSLQPEDFATYYCQQHYTTPPTFGQGTKVEIK

SEQ ID NO: 198 - protein, 10 aa, Artificial Sequence
  Description of Artificial Sequence: Synthetic 10xHis tag
HHHHHHHHHH

SEQ ID NO: 199 - protein, 15 aa, Artificial Sequence
  Description of Artificial Sequence: Synthetic peptide
  MISC_FEATURE (1)..(15): This sequence may encompass 1-5 "Gly Gly Pro" repeating units
GGPGGPGGPGGPGGP

SEQ ID NO: 200 - protein, 25 aa, Artificial Sequence
  Description of Artificial Sequence: Synthetic peptide
  MISC_FEATURE (1)..(25): This sequence may encompass 1-5 "Gly Gly Gly Gly Ser" repeating units
GGGGSGGGGSGGGGSGGGGSGGGGS

SEQ ID NO: 201 - protein, 6 aa, Artificial Sequence
  Description of Artificial Sequence: Synthetic 6xHis tag
HHHHHH

SEQ ID NO: 202 - protein, 5 aa, Homo sapiens
LHPIQ

SEQ ID NO: 203 - protein, 10 aa, Homo sapiens
TFAVGPGHCL

SEQ ID NO: 204 - protein, 6 aa, Homo sapiens
LRARVQ

SEQ ID NO: 205 - protein, 6 aa, Homo sapiens
LRCRVQ

SEQ ID NO: 206 - protein, 6 aa, Homo sapiens
LRAKVQ

SEQ ID NO: 207 - protein, 6 aa, Homo sapiens
LRARIQ

SEQ ID NO: 208 - protein, 6 aa, Homo sapiens
LRARPQ

SEQ ID NO: 209 - protein, 6 aa, Homo sapiens
LRCRKQ

SEQ ID NO: 210 - protein, 6 aa, Homo sapiens
LRRRRQ

SEQ ID NO: 211 - protein, 6 aa, Homo sapiens
LRRRHQ

SEQ ID NO: 212 - protein, 6 aa, Homo sapiens
LRTRPQ

SEQ ID NO: 213 - protein, 6 aa, Homo sapiens
LRYRPQ

SEQ ID NO: 214 - protein, 6 aa, Homo sapiens
LRNRPQ
